United States Patent Application Publication US 2003/0143606 A1 - sequence listing, part 6

SEQ ID NO: 2020 - DNA, 12359 bp, Artificial Sequence
  chemically treated genomic DNA (Homo sapiens)
tttgtagggagaagatatataaggttattatttttgggtttttagtaattagttgttatgtttttgaagttagagttgggtagaattagagttttagggaagatgggtagagtttagggagttgtggaagtatttttttgtttgtttgtatttagtaggtaagggaataataagggtttgaggttttggattttttggttattggtttagttattcgatgtgttgagtttgttttgaagagggcgggggatatgttggtagaaagtatattggtggttaggtgcggtggtttatatttgtaatttagtattttgggaggttaaggtgggtagattatgaggttaggagatcgagattattttggtttatacggtgaaattttgtttttattaaaaatataaaaaattagttaggcgtggtggcgggtgtttgtaattttagttatttgggaggttgaggtaggagaatggcgtgaattcgggaggcggagtttgtagtgagtcgagattgtattattgtattttagtttgggtgatagagtgagattttattttaaaaaaaaaaaaaaaaaaaaaaaaaaaggtatattggggttggtgggatagtggtatataagtttgtaattttagtattttgggaggttaaggcgggtggattattttaggttaggagttcgagattagtttgattaatatggagaaattttatttttattaaatataaaaaattagtagggtgtggtggtggatatttgtaattttagttatttgggaggttgaggtaggagaatcgtttgaatttaggaggaggaggttgtagtgagtcgagattgtattaatgtattttagtttgggtaataagagtaaaatttttttttaaaaaaaaaaaaagaaagaaagaaagtatattggatttcgagttaggagttttggggtttgttagagaagatttttaattattttggtttttagtttttttatttatagtatgagaaaattattagtgtttttatgagagggatgttaggatgtatgaattttagcgttttggttaaatttagaaaggtttttaaagattttataatttagtggttttttaattttgtttttatttttgtgatatatttttgtggggaggagattgaggagatggttttggggtatttttaatttatttttgtgttaattttagtagttttttttaaaaaaatttattatatatattgaggtttagtcgaagtatttatttgttgaggggtaggggatacgtttttttgttaaaaatggtttgaaatttattaattaattttagattttattatttgtaaaaattgaggattggaaggaagaagtggttcgttaaggttaagatgttgtttaatagtagatttagtttgtatatttatatatatatttttttaggttttatgtatataagtaaatttatttatttattttttgtgtgcgtatatgagtttatacgtagtatattgagtattggaaggaaagaaggaaggcggaagggaaggaaggtagagattgtttttttttatttttttttaaggtggttttttttaaggtaggtttttttaaggaggtttggaaggttattttttttggttttttattataaaggattttgtagttaggtttttggtttgatttttcgttaaggatataatattgttagagatatattgtaagggttaaaaagagaaggtattaattgtaaaattttaagtttgagttttgttggttgaattttattttatttgtaattggtgaattatgaattaatattgtgtaagttttgtaattttttggaaaatagaatagttattttgtatataaattaagggggtagttaaagtattggtattttaaaataaatatttttaaaagttttaatttttgtgattttgatttaaaaaaaaaaatttattttttatttatttataagtttagaaatgatttagaaattttttatattgtgagaagttttgttttaaggaggtttttagtattggcgggagtttttttatatttttttattgtttttgttatcgaaagtatatgttagggattgggtattaatttgtttagggtttttagtaaaagtagtgaggtattgtggttgtgatttgtgttgggcggggcggggcggggtttttttggtttagtgttagggtagttttggtttttattgttaggggtgagaggaataggtaggttatttatagttttatttagtaggttggttgtgcgcgtttttttatttatagtaaatataggttttttttatttttatgtgtagtattagattttttgggaatttatttttttattagttttttgattcgtttatattttaaatttttgggtttagttaagttgtttttagagttaataggaggttttttaggaaatgtttttaggagtaagttatgtggggaagttgagtttgttttttttttttttttttattttaggttgaattagaattattttaagtgtagggatgttttttttttaaggaaatagtatttatttttaaggttttttttatggggtgatgtttttttttgtcggagttttgttatgaggtaggatgaaaagttttgatagttgatagtatagttattttttttggtagtgtttcgtgatgttttaggtttttgaaattagaattcgtgtgatagattgagggtatttggattttatgggtagttatagttttttttataaagttttagatttatattttatgtttttgttttttagaaatttttgtttaattataagattttttaggatgggtttatgtgtgtgtttttaaattttttttatgtttttataagtgtatttttttatttatagttttttattgggttttgtttattgtttaattagtgaaggtttgttgattatttataatagttaattgtatgtagttttgttttttattattagttttggaaaagttgttgttttacggaagagaaaggtaattgttttgtttaatttaatatttattttttatattaaagaacgttttttaagagaattttaatttttttttttttttttattttaaataaaaatgagatgggggttttattgtattgtttaggttggttttgaatttttaagtttaagtaatttttttatttcggttttttaaattgttgagattataggtgtgagttattgtatttagtttttaagagagttttaaattttaattttaattttaattattgtggatttgggtttgatttttggttttgattttttaattcgggttttttatttgtgtgaggattaaatgagattatgtatttgaaggtatgttataaagtgtaaaatttttgtaagtggtagaggtttatttatttatttatttgtttataaatagtagattttttagagagattttttgattttttttttttttttttttttttttggtgatatagggtttttttttgttgattaggttagagtgtagtagtgtaattatagtttattgtagttttaatttttttgggtttaggtgatttttttattttagcgttttgagtagttagtattataggtatgtgttattatagttggttaatttttgttttttttgtagagatggggttttattatgttgtttaggttggtttttaatttttgagtttaagtgatttgttttttttagttttttaaagtgttgggattataggtatgagttatagcgttttaaggattttttgatttttaaagtgagatagtttttttttttattttttttattaatttaatgttaaaatttaggagtggtggaatgtttttgtttagggtagggttgggtggaagttttgatgggttggttaagttattaggagtagttatttaaggttaattggttttgtatggagaggttgaggttgggttgggaatgaggttgggtttgttttttagggttaggtagggttagtagtagggttacgtcgtattttgaattggtattttttttatttgttagattttttgtttaattggttatttttaagtttttatgttttgatttagagttattttgtagtggagaatggggttgtttttgatttagcgttgtgtcggtgaatgtcggaatatttttttttttttttttttttttttttgtttttaatttaggtgtttgaaagttattttgttttttgtatttttttttgtagtttagaagggtgttggaagtagggagaattaagtagtttttgttaatttatgagtagagttagtagaggagtgagtttgaggtttttttaaggtttttattagggttgatgtggttttgagataataaaggagttttatgggggtatgatgattttaagatgtttttttttaggaaggtgaaacgatataaggatgagtttgtttggggtagtgggaggagagtttgtggtgtatattagttaggagagaagatttttatttttttattattatttagtgatgcgaattttgttttgggttttagtttttttatttgtaaaatgggaataaaaaaattttttttatatttatattttttatttaattgttagaagtaagcgtagttagtagttttaaaatgtattatagattaaaaagtgttaaaaataaaaataatattattatggagagattatttgtttttttagtgtttattataaggtaaagtgtaaatagaatgaagattttttggttttaggttattagtttagaagagaaagttttttattttgagcggtggggaagaaattagggtgagacgatttttttttgatagttcgttatttattatattttttgttttatttttttagtatttttaagttttgaagaaagtttagaagagtgtgtttgatgttttgagtgattatagatttgagatttaattttgtagttttttatttagatgtttagttaggtaggtttaggtaaagtaattgtttttttgttttataaaatggggatattaatatttttttttttgttttgagggttaaatgagttaatatatgtaaagtgagtgttttttgaatgttaaggttttgttgatattattttaaagtaatggggtttttttttttttagtttggttagagggtagtttttatgtattgttcgaaggtagggatttttgtgagtggggtattagtttttttatatagagtaatttttttttttttgtggtttgtgagattatatttgggttttagaaataattaattgaggagattttggaagtttttagttatttagggaaagtttgttttgtttttttaatttattaattttttatcgatgttttttgtaataggtgaggggatattggttatagaaggtgtaagtttgttttttttagtgggttatggagttttattgcgatttttgattttttttagttttttgtatttagttttttgttttttttagttttgaaatgttttatttatatgtttaataaatgggattgtttattagggaggtggagggggtatgaagaaagtgtttagtttattttttgtgagagtttagataggtggttgttgggaaggaggagtagggatttataagggttaggggaagggtttagtatatgtttttggggttttggggtaggtagattaataggtgaggggaaatagaagttttgtggagttattttgggggaatttttttattggaatgtttttttgtgatatatatggttgtttgtgtttgtaaggaggagagagggagatagtttttttttgtttatttttattttttaaaaaagaggtggtttatttgggatattttggtgttttttttttaggatatagtttttttgtttagttaatattgtcggagttttgggtttaaaaattatagtaaagtttttttttaggtttttgattttcgagttttggtggattattagaattttttgaagtattaaaataagatttttgggtttcgatttagtagatttgtagtgagagtcgatatttgtatttttagtaagttttttatatttttttttttttagtttttaggtgattgtgaagattagttgtgtgtgggatttttgatttttttatatttcgtttgttttgggatagattttttttattaatagagaggaatgagtaggggagtaggagaggggtcgttttttagtttttttttttttaattgtttaaggaattgttgttttttttttttttttttttttgttataggattttttgttaatttaaatggttggaataattttagaacggttttaaagaaaaatatttttttggttgtttgtaggaaaaaaaaataaaaaaatgaattgtttttagagttgggaattaggatttttaaggattgggaattgggtcgtttttttttttttttttaaaagttaagtggtttggattagtgagatagaaattgaaagttgttgagaagatattgtgtaggttggaaaaagtcgttttttttttttttttatttagtgaagttttaaataatgaagaaatttttttagttttcgtttttgtttattttttttttattcggtttggatttgggatgtaagatttttttttggttttgttattttagtgggaaaacgtattttatttttgtttttatagttagggaggtgtgtgtgagagggcgagagataagatgtagggaatatgtgtgtatgtatgtgtgtgtgtgtttgttggtgtttggtgatgatgtggtttagttttgtatgttagatgtagagggtagaggtgaatggataggatgtttttattttgtatggtcgtgtggggtgatggtagtgaacgtgtagttttcgtgtgatgtgtgtgatttttataatgtgtgataatatataaaaggtgtaaagaaatgggttttggagtttagtttttatggaaatatttgatttgtagaaatattttgtgtagcgtggttttttgtgttataataaatatttgtagtaggaaagtttaatttttgtagtaagtaaatataggggtatagagtgatgaaaagaaaaggaagaggttataggaaagaagttaggaagattaaatttgaatttatttgagaggagaaagaggtgggaggaaggaaggagtgagaggatagagattagattaataaatggatagagttggaggaaatttattggatgaaagattttttttagttttttgtttattttttaattgggtttatttgtatatatttgtttttttttttagttttgagtttagttttttttttttatttttttttttcggcggagttgtggtagtagagagttagttagaagatttgattttttagtggtgtgtgcgtgtttgtgtttgtttgattttttttttattagattttattggggtggggaggttagtttggggggagggaggggtagattatagggagggaggggaggagaggagggaggagggagggaggggaggggaggagagagggagggagtttgggaaaggaggaatgataataaagtttttatttggtagttaaaatttttaaagattttatttatatattatttttattaatagatttatttttaataatatttttttttgttgttgtcgtttttggagaggggttgtttgatttatgtttggaaaataagttaaattaatagagtgaaaaggtatgaaaagtaatttttgtgtaagttaggattggatggttgggtttagtattagtttgtttaattttttttaataatcgttttgttttttggggtcgttgttcggtagtgttaaatttttaaattagtgaggggtttgggatgttttttttgagtagtgatagtttttttttaagttattttttttaggaggttgtaaagggagtggagttttaggttggtataggagatgatttcggtttggttgttagggttgttttgagaattagagagggagaagtttggtttgagttgtatagtaaagttaaggtagaattaagatttaatgtaagatttaaagttattgtttttagtttatgtggataatgtagtggttttttttagtttttttatattatatttaggtgagatttaggggttgtgtggttattatataaagtgatgggaaatttaaattttttttgtgtatattaatattttagaagatttagttaagtaatattattatttttaataattttttaataatgttttttaattaagaaagtataatatatttgtaggtaagtagatgtttattaaaattttttgttatggttaggtatagtggtttacgtttgtaattttagtattgtgggaggtagaggtaggcggattatttgaggttaggagtttgaggttaatttggttaatatggtgaaattttgtttgtattaaaaatataaaaaaattagttgggtgtggtggcgggtatttgtagttttagttattagggaggttgaggtaggagaattgtttgaatttgggaggtaaagtttgtagtgagttaagatcgtgttattgtattttagtttgggtaataagagcgtgattttgttttaaaaaataaataagtaaataaaataaataaatttttgttattttagttgattatttagaaaatgtaacgtaatttttttttttattattggttttatggagagttgtagagttttatgataggggattgtttgtttgtttttcgtaatatggggtagaggagagaatattaaaattagggtttgtagttttgggtttagttatttataagttatatggttttaggtgaattatttgattatgaggatttttagtttttttatttataaaatgtggataatattgattttatagggttgggaagattaaatattgtaaatgtgagagtattttataaattgggaagatattagggtttaggaaagggattgcgatgaatggtaattagtttaagaaaaggagaaggaaaaataaaatttagatttttttttaatttttttttattttagattttatggttttacgttttgttggtgaggttttgttggaagatagtacggtttttttttaggtttatattaattgtggttttgttaggttgtttatgtgttttattttttatttagatgggatatggcgttttttgtaggtcgggaatattagacgttagatttgtttgttttttttggtatggtgggtggtagatgatagagggtaaaaaagattggttgggtacggagatttatgtttgtaattttagtattatgggagacgaaggtagaagattaatggagtttaggagttcgagattagtttgggttatatggggggattttgtttgtataaataatttaaaaattagttgggtgtggtggtgtgtatttgaagttttagttatttaggagattgaggtgagaggattatttgaggttaggagattaaggttgtaatgagttatgattacgttagtgttttttagtttgggttatagagtaagattttgttttaaaaaataataaggtgagtaaagtatagtgaggtatagggatgatgggtagagtgtttgtggggatagatagattggaaggagtgtggagtatgggtaggggtaggggtgttatttgtatttatttgtatgatagttatttaaattttaagagtttatgttttcgggaatggatggttaatttttaagttttgtttaagttagttattttttttttttttttttttatttttcgtattttacgttatgtagagagaattggaaagaagtatagatatggttagtaggatatttaggagtgtttagaatagagtttgttaattagtggtttgtggatttaatatggtttgagtatttaattttttttgatagtacgttaattttttaaaagttttgtggaaattttaaaacgtatatatatttatatagtatagtattaatatttttattatttaatatttagttttaataattatcgatttatggttaattttgttttttttgtgttttttatttttataaattttattggtatattttgaagtattggttaaaaaaaaaaaaaaggatttgaatatttttagttaggataagtattttttagtttaatatagtcgttattttggtagataggggtttaggtttttgggatttggttttgttttattgtatgttgtgtgattttgaagatgtttttttttttttttgattttagtttgttatttataaaatacgaggttgtattaaatgattttttagtgtttttttaataatattgtgaagagagagtataaggtttggggttaggaaatttggattaagatgttaattttgttgttttttagttatttggtgagtaggttttagtatacgagttttggtttttttatttgttttattttttttttagggtatatttaagataatataaggattattggtagtaatggtaggggagtattttgtgatttattggttttatgtattttgggattatgtggattttttaggaagagttttttttatttttttagagttttagggatattagtggtgtgtttttaatttaggggaggtatttattttttgttggtgtagttagagaatagttataggtatatgatgtgaatgttggggtatatggtgagaagtttagatatgtatattgttgttgttattgttgtttggttttaggagagggttaggggtagtatggttaggagatagaatgtagggagggttaggtagtagagggagggggttttttaagttggtgggttttagttgtatttgtagagttgggatttgtttatattttttatttagatcgaaatttatttggggggtttattatttttttgatttttatagtaattgttgttttggttataagtagtgagtgtttaaagtaagagaagaaaggatataattgtgtaatattttttttatagaagtataggagggaggtatttaagttttttatttttttcgtggtggttttgagattttgtcgggaaggagtagtgtgggttcgaagagtttggtttaaattgtttagtggttattaggatttatagaggttggttttggacggatttttattttgtattagttgaggtttttagtttagggtgggtggggtttgggtaaatgtataacgggggagaagttgtgtgagttttgtggtagtttgttttattttttagtttggggggtttgggttgtttggggtgagtgggtttttgttgggtagagatagtattttgtttattatggtataatttatagtatttattaacggtttggtatattttgggtgtttagtaggggtttgttttattgaatttaagagggttgaataaggagattttttgttattttttttttttaaaaaaaggttattattttttgaataggtaatatatttttttgattgaaaatttaagaggtataagagtttgtatagggaaaaagtgtttttttttgtttatttttttattatttatttttttttagaggatcgtgcgttagttttttgtgtttttatagatttatttaatgtatatattagtaataaataagtagttatgtatttttatttttatttagtggtataggtattttttgaagatgattatattggtttttttggtgattttttttttgtttttattttttaatatttatttagttgatagttttttttggtgaatatttgggtttttttttttttttttttttttttttttgtgatagagttttttttttgtcgttaggttggtgtgtaatggtgtaatttcggtttattgtaatttttgtttttagggtttaagtgatttttttgttttagtttttcgagtagttgggattataggtgttcgttattaaattcggttaatttttgtatttttagtagagaaggggttttattatgttgattaggttggttttggtttcgaatttttgattttaggtaattttttttttttggttttttaaagtgttgggattataggagtgagttattttatcggtttgggttttttattttttttttttttttttttttttgagatggagttttattttgtcgtttaggttagagtgtagtggtataattttggtttatttcgagtttcgttttttggatttacgttatttttcggtttagttttttaagtagttgggattataggcgttcgttattacgtttggttaattttttgtattttttagtagagacggggttttattatgttagttaggatggagatttttttatttttaaggtaggtagtgttggagttggagttttataaatttggttgtaggtttg

SEQ ID NO: 2021 - DNA, 5982 bp, Artificial Sequence
  chemically treated genomic DNA (Homo sapiens)
tcgtaaggttttcggtgaggagtcgttttttggatttttttagtggcgttgttcgtatgggcgtaggcggtggtgtcgggagcggttagtaggtggcgtttaagtttggtttgtcgaaagggaaggggttgtagaaagggaaggggttgtagtttttttcgattttagacggggtgttggtttttggtttagtttgggagaagggcgggggcgaggaggaagttgtttttatatttagtttttaggggttattagtttagttaagcgtttttagttttggttagttttttatttttaataggttaggtttgattgtttagtgttagtttttttatttttttatttggttttattaatttttaggaatgggttttaggtttttgaggtgggggtgggggattaaattatttttttgggtaggtagggttggtttgtggtttagtagttatatttttttggttaagaggagacggatttaggtagttggagatttaggttggggtatatttgttttttgttttttagtttttgggagtagaagtggtttttttagttttttttttagtattttttatttttggtttttagttgttttttttgttttgttttatatttatgttaggtttgagttaggatttttgtttttttgggattatttcggttttagtttttagaaatttgtagaagtttggagaagtttggggtggtggtgaaagttaggaaggataagtttttgtttagaacgtgttaaaattaagttttttttatatttattttttttttgttttttatagatatgattagttagcgtttagcgggtggtcgttttggttttggtttataattgggtattggtcgagggattttgcggtttcgatttcggggtttcgttacggtggaggatttggtgagtgttttagtcggattttattttcggtatttttttttttttttttttttttttttgagatagagttttatttttgttatttaggttggagtgtagtggtgtaatttcggtttattgtaatttttgttttttaggtttaagcgatatttttgttttagttttttaagtagttgggattataggtgtttattattatgtttagttgatttttgtatttttagtagagatggggttttattatgttggttaggttaggagttggtttcgaatttttgatattaggtgatttagtttttttggttttttaaagtgttgggattataggtatgagttatcgcgtttagttttttttttttttttataatcggtagtattatttgttagttgaggggattttgggtagatagtttggattttagtttatttttgttattttttagtttttagggattttttttgggtatatgggtcgtagtttgtttattagtaaaatggggatgagttgaatatcgatattatttttttagggttgttttgaggtttaaatacgaatatatgtaaagtggtgataatggtagttcgtttaattattatgtatatttatattgttatgatgtcgttgttatttttttttggtttttagttttttgtttttgaagagaaggttattgagaaggtggatgatttgttggagagttatatgggtattagggatacggagttgggtgagtgagggttgtttgggggagggggtatttaggtttgttgggggtcgaatttattttgagttttttggtttttggtgttatttgtgttttcgttttgattttttttttaatagcggttattatggtggagttgggaaaggataaaaggaattcggatgagttggtcgaggttttggacgaacggttgggtgattttgttttttttgacgagttcgtttttgacgtttggggcgttattggggacgttaaggtcggtcgttattaggattgttttcggattttgcgatgatgattcgggcgtaatttggtgggggtttttagtagggatattgacgttaggattcgagtttttagtttgagtttagtttagtagtttaaggacgatggtgaggggaggtggggttaggttttttgtttcgttttaatcggtattattttttttttggtttttagtttggtcggggttttcggtttttttgtgttttgttttttatttattttagttgggttaggtatagggaggggagggattagttaaattgggcggttattttcgtttttattattttttattattagttgttaaattggtttttttgtttttttggggttttgggttttgtttgggggttatgatttttttagttttttgacgtagggaatataggggagagggttgtttttttttttagtaaatgtaataatgtttttattttttttgagaggagttttttttttgtggagtttgttattttcgtatttgatacgagtttgttgtgaatttcgtaattttttttttattttttatttttttttttaggtttatttttggtttagagtaggagggagggagggacgatggcggtgggtttttgtatttgaatttgttgttttgaatataaagaatttatttgttgttggatttgtgtggtttcggggtgggagagggggaagattggggttgagaaagaatttagtagttgaaatttatttttcgtaggttttaaattgaattaggagttggtattaagttatttgtttttttttattgttttttttggttgtaggttattaggtttttaggtagggttagagttttttggattattgagggtttaaattttgtttttttttttataaggttttttattttttggagttttataaggttgttgtttgtagttggtgataattttcggatcgtggggagtattagggtattgaaatttggtttggaaatagaaagatggaattttaggtttgttagagttttatttttatatcgggaggttgggggtaggcgtgaggtagtttttattttattcggtttaatgttggatacgtaggcgtttatggggtattttgttttgttttagatataaatttagtatatttgttttgataatttatttattttcgaggattgagggtgattagggaaaggcggggtgggattttggttagatttggagggaagggaagggattgaagtaaggggcgttgggttagaaggttttataggaatgtttgggggtgagtcgagaggttgtggggaagttcgaggttagtttgtaattttcgttttaaaaggcgggcgggtattgggttattaggaagaggggaagggggaaaaggggaagattttgggggttgggtgttggtggatagattcgggtggagtcggggagtcgtagttttggtgatttagggtattttcgggtatttgtgggttttttaggtgtttgtgttgggagtcgtttgcggtggtgaaggggtgtggttatgtgtgtttcgggtgttgggtagtattgtgagtttattaagagtgttgatggttcgtgacgtaatgagggagggttgtgtcgtgggtaagggatgtgataatcggttttgtgttttagggtaattgtaggtgtaattggtagtgtttggtggtggggagtgtaacggagtgattgtgttttggggtgtttcggggtgtgggggtgtgtgttttagggtgttgtttttggggtaaggaggggtgtttggttaggttttggggtgtttaggggtgttagggtatgtttcggggtgttgttgttttttgggtgggggtgttggttaggtttaggggtttttaggggtgtaggtgtgtgtgttttagggcgttgttgtttttgggtgagggtgggggtggttagttaggtttttggtgtttagcggcggggggtgttattttttgtgttttgggtgtacggagtgtgttggtggggtttgtttgggattgttgaggggttattgaaagttaaatagagtgtggttaggggtagttttggtaataaggagtgtgtgtgcgtgtgtgtatttttcggggtgttaagtgagattttattttttagtattaaggagggtggttcgggtgattattttagagggttgtattttggggtgttgggaggggttggaattgaggtagtaattttgggtgcgtttcggcgttgggggtaagattttgagtttagggatgtggcggtagtaatttggttgtgttgagatggggataggatgaaattgagtggtaagtgataggattgtatgttttagggtgtgaggttgtgttagtgtgattttattttttagggtaggaggcgagtttttgtgttttaggacgtgtgttataggtgttatttagtttattttaaaggagttagttattggggagagtttttaggtcgttaggttttttggtttttttgtttttttttagtttttttttaggatatgattcgttgtggttttagtcggggtttaagtttttgtataaataggcggattttttggttaggttgggtttgatttaagttggtttattcgaggttttgtttattagtatttatttcgatatttacgaaggttttggtagggtagggggggtattgttggttttatagaattggagttagtttttttagttttaaagttttagggaggggggtagtggtattttttgtagttgttttagttcgttttagacgacgtttatattttttagtgtttagattttattcgttttattaatgaggtaagaggttcgattttgggggggaagggggttgttttcgttttgttgggaggagggggttatatggggttagattaattttagggagttttatttttcgtggagggagtcgttggggtttagagtggttttcgtttattgttaggagtagagaggggggtttttgttattttaggtttttagcgggcgtgcgcggggtggagcggtttttggaggttagtaagggcggcgggaggagttgaggagtcgttttaggaagagggagggaggaagcggtttgtcggagagttagggcgtagtgggcggtagggttgagcggtcggtgatggggattttatattttaggtagtgtcgggtaagggggttgtatatgagggtttttgattggggaggaggagggtatgaaggggtggggttatggttatttgttgttcgttttgtgttttcgggtttttttttttgatttgtgcgtttttgttttatcgtttgtttattttttttttttatttggtttggtgggtagtttcgtttttttagtttttattattaggatattaaagagtggatggtcgtggggtcgtttttaggtttttggggtagggatatggagtggaatcgtgggtatttagggtgaggtagaggtgatcggggtagggtttggcgagagatcgtagtggagtagaggtaggtttatggggtaggggtagagatgggtttatggtatagatgtggttgtgttatgtggggttagagatgggtttatgggggatagggatatggtcgtggggagagatgtgttcgtggtggtagagatggggttggggtatcgaggatgggattggagtaaagttgatatggggaaagttaggtagggttatagtggtagaaatgggtgagagttattagatggagttataggttttaggaatttgttgggtgtaaaaatggaaggtgggggtcggaggtattggtagagatgtttgagggcggggttggggggaattttgtaggaaattatgaagggtagagaaagggttagtggggttagagggaggttttggagtaggagatggggtggtgagaggtaaaagagagggagaagggtttttaaatggagtggttaggttatttggagttgtttatggtaattgttatgggtagaggggtcgtttgagaacgttatggagttaaataggttttgatgttttgagatggtatcgtgggttggttttcgttcgggtttagttagttttattttgttttttttttttttatttagt

SEQ ID NO: 2022 - DNA, 5982 bp, Artificial Sequence
  chemically treated genomic DNA (Homo sapiens)
gttggatagaggagaggagggtagagtgaggttggttgggttcgggcggggattagtttacggtgttattttagaatattagggtttgtttgattttatggcgtttttaggcggtttttttgtttatggtagttgttatgggtaattttaaatgatttggttattttatttggaaattttttttttttttttttgttttttattattttattttttgttttagggtttttttttaattttattggttttttttttgttttttatggttttttgtaagattttttttagtttcgtttttaggtatttttgttagtgttttcgatttttattttttatttttatatttagtaaatttttggggtttgtggttttatttgatagtttttatttatttttgttattgtggttttatttgattttttttatgttagttttattttagttttattttcgatgttttagttttatttttattattacgggtatatttttttttacggttatgtttttgttttttatggatttatttttgattttatatggtatagttatatttgtgttatggatttatttttgtttttgttttatggatttgtttttgttttattgcggtttttcgttaggttttatttcgattatttttgttttattttgggtgtttacggttttattttatatttttgttttagaggtttggaggcggttttacgattatttattttttgatattttggtggtgagggttgaaagggcggaattgtttattaggttagatgggaagggaggatggatagacggtaagatagggacgtatagattagggagaagagttcggggatataggacggatagtaggtggttatggttttatttttttatgttttttttttttttaattagggatttttatgtgtaatttttttattcggtattgtttgggatgtggggtttttattatcggtcgtttagttttgtcgtttattgcgttttggtttttcggtaagtcgttttttttttttttttttttggggcggttttttagtttttttcgtcgtttttgttggtttttaggggtcgttttatttcgcgtacgttcgttgggggtttggagtggtagagatttttttttttgtttttggtaatgggcgggggttattttgggttttagcggttttttttacgaggagtgaggttttttggagttggtttggttttatgtgattttttttttttagtagggcgggagtagttttttttttttttaggatcgggttttttgttttattaataaagcggataaaatttaaatattggaaaatgtgagcgtcgtttggggcgggttggggtagttgtagggggtgttattgtttttttttttggggttttggagttagagaggttaattttaattttgtggggttagtaatgttttttttgttttgttaaagttttcgtggatgtcggggtgggtgttggtgggtagggtttcgggtagattagtttgggttaggtttagtttggttaggggattcgtttatttatataggggtttaagtttcggttagggttatagcgagttatattttgggaggaggttgaaagggggtaggggaattaggaggtttggcgatttggggattttttttagtgattggtttttttaagatgggttgagtgatatttgtgatatacgttttaagatataaagattcgttttttgttttgagaagtagggttatattggtatagttttatattttaagatatataattttgttatttattatttagttttattttgtttttattttagtatagttaggttgttgtcgttatatttttgaatttagggttttatttttagcgtcgggacgtatttagagttattgttttaattttagttttttttaatattttaaaatgtagttttttgagatgattattcgaattattttttttagtgttgggaaatagggttttatttggtatttcgagagatatatatacgtatatatattttttattgttaaaattgtttttgattatattttgtttgatttttaatgattttttaataattttagataggttttattagtatatttcgtatatttaaggtataagaagtgatatttttcgtcgttggatattagagatttagttggttatttttatttttatttagaaatagtaacgttttgagatatatatatttgtatttttagagatttttagatttagttagtatttttatttaggaaatagtaatatttcgagatatattttgatatttttgaatattttaaggtttagttaagtatttttttttgttttagaaatagtattttaagatatatatttttatatttcgggatattttaagatatagttatttcgttgtattttttattattagatattgttagttatatttgtaattgttttggaatatagagtcggttattatattttttatttacgatatagtttttttttattgcgttacgagttattaatatttttgatagatttatagtgttatttaatattcgagatatatatagttatatttttttattatcgtaagcggtttttagtatagatatttgaggagtttataggtgttcggggatgttttgagttattaggattgcggtttttcgattttattcgggtttgtttattaatatttagtttttagggttttttttttttttttttttttttttttttggtggtttagtgttcgttcgttttttggaacgaggattgtaagttggtttcggatttttttatagtttttcggtttatttttaagtatttttgtggggttttttggtttagcgttttttgttttaatttttttttttttttttaggtttggttagggttttatttcgtttttttttgattatttttaattttcgaagatgagtgggttgttaaaataagtatgttgggtttatgtttaggataaagtagggtgttttatggacgtttgcgtgtttagtattgggtcgggtggggtgggggttgttttacgtttgtttttaatttttcggtgtaggggtggggttttggtaggtttgaggttttatttttttatttttaagttaggttttaatgttttggtgttttttacggttcgggggttgttattagttgtagatagtagttttgtgaagttttagggggtaggaggttttgtgggagagggggtaggatttgaatttttagtagtttaggaagttttggttttgtttggaagtttggtggtttgtagttagaaggaatagtgggagggggtaggtggtttggtgttagtttttaatttaatttggagtttgcggaagatggattttagttgttgaatttttttttagttttaatttttttttttttttatttcgaagttatataggtttaatagtagatagattttttatgtttaagatagtaaatttagatataaaaatttatcgttatcgttttttttttttttttgttttgggttagggatgggtttggaaggagagatgggaggtggggaggaggttgcggggtttatagtagattcgtgttaaatgcggaggtaataggttttatagggagggggttttttttaggaggggtgagggtattattgtatttgttggggggaaggataatttttttttttgtattttttgcgttaggaaattaggaaggttatgatttttaaatagaatttaaggttttagggagatagagggattagtttggtagttgatggtggaaagtggtggaggcgggggtggtcgtttaatttggttgattttttttttttttgtgtttgatttagttgaggtaggtggggaatagggtataggggggtcggggatttcggttagattgggaattagggaggggatggtatcgattggagcggggtagggggtttggttttatttttttttattatcgtttttgggttgttgagttaggtttaggttggaggttcgggttttgacgttagtgtttttgttgggggtttttattaggttgcgttcgggttattatcgtagggttcgggggtagttttagtagcggtcgattttggcgtttttaatggcgttttagacgttaaagacgaattcgttagggaaggtaaagttatttagtcgttcgtttagggtttcggttagtttattcgggttttttttgtttttttttagttttattatggtggtcgttattgggggaggggttagaacggaggtataaatgatattagggattaaggggtttagggtggattcggtttttagtagatttagatgtttttttttttaggtagtttttatttatttagtttcgtgtttttgatatttatgtaattttttagtaggttatttatttttttaatggttttttttttaaaggtagagggttgggggttagggaggggtgatagcgatattataataatgtgaatatatatagtaattggacggattgttattgttattattttatatatattcgtatttagattttaggataattttgagaaggtggtatcggtgtttagtttatttttattttattgatgggtaaattgcggtttatgtgtttaaggaaggtttttgggagttgggaagtggtagaagtggattagaatttaggttgtttgtttagagtttttttagttaataggtaatgttgtcggttatgaaaaggaagggagggttgggcgcggtggtttatgtttataattttagtattttgggaggttaaggaggttggattatttgatgttaggagttcgagattaatttttggtttggttaatatggtgaaattttatttttattaaaaatataaaaattagttgggtatggtggtgggtatttgtaattttagttatttgggaggttgaggtaggagtatcgtttgaatttgggaggtagaggttgtagtgagtcgagattgtattattgtattttagtttgggtgataagagtgagattttgttttaaaaaaaaaaaaaagaaagggaagggatgtcggagatagggttcggttggagtatttattagattttttatcgtggcggggtttcgggatcggagtcgtagggtttttcggttagtgtttagttgtgggttagagttagggcggttattcgttgaacgttggttgattatgtttgtgggaggtaggagaggagtgagtgtgggggaagtttggttttagtacgttttgggtaggaatttgttttttttggtttttattattattttaaatttttttaggtttttgtaagtttttgggggttggggtcggggtgattttaggagggtaggaattttgatttaggtttggtatggatgtggggtagagtagggggaatagttgggggttaggaataggaaatgttggaggggagattggaggggttatttttgtttttaggggttgggggataggaagtaggtgtattttagtttgagtttttagttgtttgagttcgtttttttttggttaagggggtatggttgttgggttatagattagttttatttgtttagggaagtgatttagttttttatttttattttaggggtttggggtttatttttgagagttagtgaagttagatggaaaagtgggggggttggtattgagtagttaagtttggtttgttggggatagggggttggttagggttgagggcgtttggttgggttaatggtttttggaagttaggtgtgagggtaatttttttttcgttttcgttttttttttaggttgggttaagggttagtatttcgtttggggtcgggaggagttgtaattttttttttttttgtaattttttttttttcggtaggttaggtttgggcgttatttgttggtcgttttcggtattatcgtttgcgtttatgcgagtagcgttattggggaggtttagggggcggttttttatcgaaggttttgcga

SEQ ID NO: 2023 - DNA, 7203 bp, Artificial Sequence
  chemically treated genomic DNA (Homo sapiens)
  unsure 5391, 6220, 6249..6250, 6253..6254, 6256, 6260, 6262..6263: n is a or g or c or t
ggttggagttgttgggatgggtcggattgatttaggtttttttgtttcgtagatatgttttttcgtaaagtggttcggtagagtaaatttcggtatgtgttcgggtagtcggttaagaacgattagtgttatgaggatattcgcgtgtttcgtgttatttgggataatattttttgcgtcgttaattttaagtttttggcggtgattgtggaggttagtggagggggtgtttttttggtgttttttttaagtaaggtgggttttgttagggttgggggaagaggaggtatttcggttatttttattgggtttttttgtatattttgaattttttattttgtcgttttttatattgttgggtaggtgttataatttagatttatcgttttaagtgttagtatagatggaaagtagtttgttgttatagaggtagggttagaggtagtaaatattttttgtttatttggtaagtggggtatagttatatttgggttatttgtgagtcgggacgtgtatgttatttttattttatggaggggaagattaaggtttcgggagggatggagtttattgattgttttttcgtgtttatagacgggtcgtattgataaggtttattcgacggtgtgtgggtatacgggatttgttttggatatcgattggtgtttttataacgacgaagttatagttagcggttcggaggattgtacggttatggtgaggtataggattggttgggttagggtcgtgggtgtggtcgaagggggttagtaataggattagtagaggattgagttcggtggttttgtttttattataggtgtggtagattttagagaacgggttgattttttcgttgatagagtcggtggtggtattggaggggtatattaagcgagtgggtattatcgtttggtattttacggttcgaaacgtgttgtttagtgtaggtttgtatcgtttttcgttttgtgttttttttttttacggatttttttatatattttagtagtttttttagggtttatatgataaatgggaaagttgaggtttttagagttggagagattcgtttgttttagggtggtgggtagagtgggttttagtttggtgagttaatggttttttgttatttattcggttcgagttgataatttttatttgttaggttgcgataacgtggtatttatttggaatgtgggtatagcggaggagttgtatcgtttggatagtttgtattttgattttatttataatgttagttggaattataatggtagtttgttttgtttagtatgtaaggataagagcgtgcgtattatcgattttcgtcggggtattttggtggtagtacgtggttttggagggtaaggatggttgtggataggtttaggattttgagtagggcgttgtattgattagtttgttttttcgataggagcgggagaaggtttatgagggggttcggtttatgcgggttatttttttggtagatggtaaggtgtttattataggttttagtcgaatgagcgagcggtagttggcgttttgggatttagtgagtggttagtttgagggggtaaatttgagatttgggttttattttgggttaggtaggtagggtttattttggggaggtttgtggtttttagtttttttgtttggaatttgaggtttttagggtttaggattttgttagattttttttttttgttttttgttcgttcgattgttttattatttttttatggttttttattgtttttgtgtttttgtttatgttgtttatgttaacggaagggttttttttttttttgtttgtttgtattatttattgtttgtatagggtttttcgtttttttagaaagtttttttttttagtaagttttttggttttagttttttttgtttttgtatagtgatttttagggtattttgagtaggggttggtgtcgttggtattttagttttttatagtgaggtatgttttagtatttgtttagtggtttgggtatagttttaaggtttggaggaggttggaaaagagggattttgggaataaagtgaagttaggagggttaggtgggggtcgttatgtgggaaaaggtatagagatggtagagggtttatttgtatttaggggtagtgttggttggttttagtgaggttagttaaggttcgttttggtttgggattagggggtgaggaggttttgtttggtttgattgtttgtaatgtgttaggaaaatttcgaggaatttatggttttgtaggaattggattcgagtaacggggttttgttgtttttttacgatttcgatattagtgtggtttacgtttgcggtaaggtggggttgggtagggttggcgaggggtagggaagaggcgtgtttaggtgttgagttttttttttatatagggtgattttagtattcggtattttgagattatagaggagtttttttatatttattttttgaatacgtttattagtaaggagtcgtagcggggtatgggtagtatgtttaagcggggtttggaggttagtaagtgcgagatcgttcggtaagagggttatcgaggttattcggggataggggtatttaaggtgagaggttaggttattggaggttgtttgggagtaggaaattttgcgttagggaggttcggcgggttatgagaattgttacgaggtagttcgtgtgggggtttagttattttaggggtcggtttgcggaggttttggggtgaggattggaagtggaggatgttaggagagttggcggtgggtggggggggcggtgagggttttattcgtggtttttttttgtatttttaggttttataaattgtatgagcgtaagtgtgagtttatcgttatgattgtgttaagaaaggtgaggtcgttcgtttttcggtttatttggttttttttttagtaagcgggttatgtagttgtgattagggcgaggtttgtgaatggaatatgatttagtatggtttgtgggtagtgagttggatagatgttagtttgtttttgtattagttagttgttgggttgtgttagttagggggtaagtggggatgagatagagggtgagtaggggttttgttttggatgagttataggagaaggatattaggtagttagggagggagtggtagttatatagatttttttgaaggaggtaggatttataatatagttggggtggcgttatttattgggggtaggttaggcgaagggtatagtggtgggaatggagagaggaataaggagtttggttgtagtggggaattttatgaagaggggatcgggttatatgtggtttggttttagatgttaagagtttcggatacgtttttatgattttttggttagtatttgtcgattgtttttttaatatgttaggtatattttggggagtggagttgagttgatagggtttgttttaggagtttatagtttatgggttttagaattttataaagttatatagtggtttttgtgttttgtaggggaaggtgatgataggggttttgtttagaagggtgggaaagttttcgagggagttgttgatggtgtttagaaaggaagttaaaggttagatttgagttttttaggtcgtgggagaatgggttaatagagtgtaagtttggaggttaggggagggatgaggggattttgatggggttttttaattgattttgattttttcggttttttgtttagtcggattttttttaggatgatttgtatttcgatatagtcgggttcgaggtagttttggaggttgaggagtgggtgagcgggcgggatgtcgattcgatttttattttattgcgggaggtttacgtgtttagtaagtagcgggatttgaagattagtcggcgtaacgtgttgtttgatagtcggttcgttatggtttcgggttttttttatttaggggttttcgtttttattattattgttgttgatgttatttttagcggtagtttggttagagtcggggtatgtacgcgtaggtaggggtggtgttgggagttttaggtgtggttttggtttgttgtgtgggttttagttattcgttgtttttttttggggtagtggtgggtttgggagggttatggtttagtagtttttgattatcgttttttatttttgttttatgtttttataggaggttgggaagttggaggaggtgatgtaggagttgcgggttttgagggcgttggttaaggagtagggcgatcgtatttgtcgtttggaggagtagttgggtcgtatggagaacggggatgcgtagggttatagttatacgttatttttatttttttcgtcgttttttttttatttagtttttgttagcgggtcgtatcgggttagttggttgtttagagtttttgaggtagcgtaggggttagtttttatttttattcgttttaggtttaggtcgaagttagcgtttagttttttttattgtttttgtggaggatgtttacgtttaggcgagtttttcgatttttgagggattattttttcgattattgtttagttttttgttttttttttagaggaggcgggagggtgggttttatatttttattttaaataaaattttttttttaaaagttaggttgatttgttgttgtaagggtggggttgagaagtttggaaatttggagatagaggatgttataggagttatatatgtgtagaaggtttgggggtagtgagtagttttataggtattgtttttttggattgttaggtagggaaattgaggtagaagatttgagaatatatgtaaggttgtatttagttttaagttggtgttgttttttttttggaggataggttcggtagtttagttttttttagagagattggggagggtttggtgtggattaggggttttgtagtagggaggggtaggtggggtatgtgggtaggaagcggaagtttgggttattttttattgtagacgagtattgagtttatttttcgttcgatatagttagagttggaggtgggtgttcggtacggaggggtttgcggattaatggtaagtttcggagtttttcgggtttttgggatgggggttataggcggtcggggttagaatgtttgggtttgtggagttaaggagggttttatattggttttagggaagaggtgagatttaagaggagtatggtagaggttgaattttttttttatttgagttgggttttttgggattttaggtttggtttttagtattttatatcggattaggtttttgttaggagttttgggaaggtttttatttggtttttttgtgagcgggaatttgtatttttggagtttgggcggatagtttggggtggtgggggataggtatggcgttntagggcgttttgttttattttttgcgggtcgttgtcgcgtagtttttcgtcggtggggtttttgcggttttcgattttcggaattttttgttttaggggttttttcgtttgtttttttcgcgtggattcgtgtatcgtttttgtttcgtttggtcgggtttcgatttgttcgtttcggttatttgaggcgcgtggggtatatggtgtgtcgtggagcggtttttacgtggttcgttttagtcggtattatatataatttcgtgtaaagaggttgcgtaatagggacgcgataatcgatatcggaaattatacgggtagtgttatagtgaagaagcgggatacgttaacggaagtaaataaagtacgaaaaagattagagattagtataaattagttcgagaatattagtaggcgcgaaaaataatgttaaaaataaggataatagttatgaattaaagaataaatattagagggggaatatttttattagtttcgggggttaaagaagaaggaatttattgttatgaggaatattgttcggttttagtgttaaagtggggatagtatcgttgtggagtcgttaatttttaatttttttggcggttgattttggaggttagtggaagggggtgttttttttggtggttttttttaagataaggtggttttagttagggttgggggaagaggaggtatatgggttatttttaatgggtttttttgtatattttgaattttttattttgtcgtgttttatagtggtgggtaggtgttataatttagatttatcgttttatgtgttagtatagatggaaagtagtatgagttnatagagatagggagagaggtagtaaatannttnngntaantnngtatttttttttcgatattttttatttagtttgtttcgatcgtagattttttttggtagttgcgttcgttttttttagttttttttagttttcggttttgtacgtttgtggtttttagggattgggagtggaacggaaattttgtcgttggggtagtttcgtggtggggagggaggaagaggggttttacggattttcgtttggggatttggttaagtagaagatgagtagttgtttttgggtgtatttaggtttttttattttttattttaggttttagggagagttagttttgatattagttagtaattttttttttttttttttatttttttttttatttatttaggtagtttagatatatttaatttatatttattgagtatttattaatatgtttgatttaaaaagttttcgttttttagtagtttattgtggggggtagataagataatagatataaaaaatgagtatagttattttttgcgttaggtgatatggaaggaaaaaggtattgagtgttggggggtgttggggtgggttgtagtgatagatattagggtagaggttaaggttaggtttagttttattggggtgaagtttgagtacggtgagtaggttatgtagttcgggggaggggaggatgggaggaggtggagtttttcgggtagagggaatagttagtgcgaaggttttaggtaggtggtttaatgtagttgttgggggaggtgagtggtagggaggaggttggagggatgggggttgattttatagggttagagtttggttgattaaataaggttttggttttttttgtttggttgttttaagaggattttaaagagaaaaaaacgaaagtggttttggttatttagtttgttttatattaggttttattttaggtgttgagttttttgagtttttgtttgttttttatagg

SEQ ID NO: 2024 - DNA, 7203 bp, Artificial Sequence
  chemically treated genomic DNA (Homo sapiens)
  unsure 941..942, 944, 948, 950..951, 954..955, 984, 1813: n is a or g or c or t
tttgtgggagataggtaggggtttagagggtttagtatttggggtggggtttggtgtggggtaggttgggtgattaagattattttcgtttttttttttttgggatttttttgggatagttaagtagaaaaggttaaggttttatttggttaattaggttttggttttgtgagattagtttttatttttttagttttttttttattatttattttttttaatagttgtattaagttatttgtttggggttttcgtattggttgttttttttgttcggaaagttttatttttttttatttttttttttttcgggttgtatggtttgtttatcgtgtttaaattttattttagtgaggttgaatttgattttaatttttattttgatgtttattattgtagtttattttagtattttttagtatttagtgtttttttttttttatgttatttaacgtaggagataattgtatttattttttatgtttattgttttatttattttttataataagttgttaggaaacgggggttttttgggttaagtatgttagtaggtgtttaataagtatggattaaatgtgtttaggttgtttgggtgggtgggagaggagatgggagggagggaaggaggttgttagttggtgttagggttggttttttttgaggtttgggatgggggatggaggggtttggatgtatttagaggtaattgtttattttttgtttggttaggtttttaaacgggggttcgtgaggtttttttttttttttttttattacggggttgttttagcggtagggttttcgttttatttttagtttttgagggttataggcgtgtagggtcgggggttggggggggttgggggaggcgggcgtagttgttagaggaagtttgcggtcggaataggttaggtggggggtgtcgggggaggggtgtnnanttantnnganntgtttgttgtttttttttttgtttttatnggtttatgttattttttatttgtgttaatatatggggcgataaatttgggttataatatttgtttattattgtgagatacggtaagatgaaggatttaaggtgtgtagaaaagtttattaggggtggtttatgtgttttttttttttttaattttgattaggattattttgttttaggggggattattagaaaaggtatttttttttattggtttttaaaattaatcgttaaggaaattgggggttgacggttttataacggtgttgtttttattttaatattggaatcgggtaatgttttttatagtaatgggtttttttttttttaattttcggggttggtaagggtattttttttttggtgtttattttttggtttatagttgttgtttttgtttttaatattgtttttcgcgtttattaatgttttcgaattagtttatgttaatttttgatttttttcgtgttttgtttattttcgttggcgtgtttcgtttttttattataatattattcgtgtggttttcgatgtcgattatcgcgtttttgttgcgtagtttttttatacggagttgtgtgtaatatcgattgaagcgagttacgtgagagtcgttttacggtatattatgtgttttacgcgttttaggtgatcggggcgggtaaatcgaaattcgattaaacgggatagggacggtgtacggatttacgcggagggagtaggcgggaaggtttttagggtaggaggtttcggaaatcgggaatcgtagagattttatcggcgaagggttacgcggtagcggttcgtagagagtagggtaaggcgttttgnagcgttatgtttgttttttattattttaggttgttcgtttaggttttaggaatgtaagttttcgtttataggaagattaggtaagggtttttttagggtttttgataggggtttggttcggtatggggtgttgggggttaggtttggagttttagggagtttagtttaggtgagagaaaggtttagtttttgttatattttttttaggttttattttttttttggggttaatgtggggttttttttagttttataggtttagatattttagtttcgatcgtttgtggtttttattttaagaattcggggggtttcgaggtttattattggttcgtaggttttttcgtgtcgggtatttatttttagttttggttgtgtcgagcgagaagtgagtttagtgttcgtttgtagtgaagggtggtttaggttttcgttttttgtttatatattttatttgtttttttttgttgtaggatttttggtttatattagattttttttagtttttttggaggaggttgggttgtcgggtttgttttttaaggaagaagtagtattaatttgaagttggatgtagttttgtatgtgtttttaggttttttgttttagtttttttgtttgataatttaggggagtaatgtttgtggggttgtttattgtttttagattttttgtatatgtgtgatttttgtgatattttttgtttttaggtttttagattttttagttttatttttgtagtagtaggttagtttggtttttagaaagagaattttatttggaatgaaaatatagagtttattttttcgttttttttggggagggagtagagggttgggtagtggtcggggagatggttttttagaggtcgaggagttcgtttgggcgtagatattttttataggaatagtgaggaaagttgggcgttggtttcggtttgggtttgggacgggtgggggtgggaattgatttttgcgttgttttagaggttttgggtagttagttagttcggtgcgattcgttggtagaagttgagtgggaagggggcggcggaggagatgaaggtggcgtgtggttgtggttttacgtattttcgttttttatgcggtttagttgtttttttaggcggtagatgcggtcgttttgttttttgattagcgtttttagggttcgtagtttttgtattattttttttagttttttagttttttgtggggatatgaagtaggggtagggggcggtggttaggggttgttaagttatagtttttttaaatttattattattttagagagggatagcgaatggttgaagtttatatagtaggttagggttatatttggggtttttagtattatttttgtttgcgcgtgtatatttcggttttggttaggttgtcgttgggggtggtattagtagtagtggtggtggaggcgggggtttttaggtgggaggagttcggggttatggcgggtcggttgttagataatacgttgcgtcggttgatttttaggtttcgttgtttgttgggtacgtaggtttttcgtagtgagatgaggatcgggtcggtatttcgttcgtttatttattttttagtttttagggttgtttcgggttcggttgtgtcggggtatagattattttggaagaggttcgattgggtagggggtcggggaggttaggattagttaggaggttttattagggtttttttattttttttttggtttttaggtttgtattttgttaatttatttttttacggtttggaaagtttaaatttggtttttaattttttttttggatattattaatagttttttcggaagtttttttatttttttgagtaaggtttttgttattatttttttttgtaaggtataggggttattatgtggttttatgggattttggggtttatggattgtgagtttttggagtaggttttattagtttagttttattttttaaaatgtgtttggtatgttgaaagagtagtcggtaaatgttggttagagaattatggaagcgtgttcgaggtttttggtatttgaggttaagttatatgtggttcggttttttttttatgggattttttattgtagttagattttttgtttttttttttatttttattattgtgtttttcgtttggtttgtttttagtggatggcgttattttagttgtgttatgggttttgttttttttaggaagatttgtgtggttgttattttttttttgattgtttggtgttttttttttgtggtttatttagagtagggtttttgtttattttttgttttatttttatttgttttttgattggtatagtttaatagttggttggtataagggtaagttggtatttgtttagtttattgtttataaattatattaggttatgttttatttataggtttcgttttggttataattgtatggttcgtttgttggagaaagggttaagtgagtcgagggacgggcggttttattttttttggtatagttatgacgatgggtttatatttgcgtttatgtagtttgtagaatttggggatgtaaggaggagttacgggtggaatttttatcgttttttttatttatcgttagtttttttggtattttttatttttagtttttattttaggattttcgtaggtcgatttttaaggtggttagatttttatacgggttgtttcgtgatagtttttatggttcgtcgggtttttttggcgtaaggttttttgtttttaagtagtttttaatgatttgattttttattttagatgtttttattttcgagtggtttcggtagtttttttatcgggcgatttcgtatttgttgatttttaggtttcgtttgggtatgttgtttatatttcgttgcggttttttgttggtgaacgtgtttaggaagtggatgtagggaggtttttttgtgattttaaagtatcggatgttggagttattttgtgtggggagggggtttagtatttgggtacgttttttttttgtttttcgttagttttgtttagttttattttgtcgtagacgtagattatattggtgtcggggtcgtagaagggtagtagggtttcgttgttcgagtttagtttttgtagggttatgggtttttcgaggtttttttggtatattgtaggtagttaggttaagtagaatttttttattttttaattttaaattaggacgggttttagttggttttattaaggttagttagtattgtttttaaatgtaggtgggttttttgttatttttatgtttttttttatatgacgatttttatttggtttttttggttttattttatttttagggttttttttttttagttttttttaggttttaagattatgtttaggttattaagtaagtgttgaaatatattttattgtggggagttggggtgttagcggtattagtttttgtttaaggtgttttggaggttattatgtagaagtagagagggttggggttaggaggtttgttggaggaggaggttttttggaggagcggggagttttgtgtaggtagtgggtggtataggtaagtaagggagagaagggttttttcgttggtatgaataatatgggtaaagatatagaggtagtgggaggttatgggggagtggtggggtagtcgggcgagtagggggtaggagaggaaagtttgatagagttttaggttttgagagttttaagttttaggtagagaagttaggaattataggtttttttagggtgaattttgtttgtttggtttagggtggggtttaagttttaagtttgtttttttaggttggttatttattgggttttagagcgttagttgtcgttcgtttattcggttgaagtttgtggtgaatattttgttatttgttaggaagatggttcgtatgggtcgggtttttttatgagttttttttcgtttttgtcggggggataggttggttagtgtagcgttttgtttaaggttttgggtttatttatagttatttttgttttttagagttacgtattgttattagggtgtttcgacgggggtcgatgatgcgtacgtttttgtttttgtatgttgagtaaaataggttgttattgtggttttagttgatattgtagatgaggttagggtgtaggttgtttaggcggtatagttttttcgttgtgtttatattttagatgagtattacgttgtcgtagtttggtaggtgagggttgttagttcgggtcgggtgggtggtaggaggttattagtttattaggttgaggtttattttgtttattattttgggatagacgggtttttttaattttgagggttttagtttttttatttgttatgtgggttttggaggggttgttgggatgtatggaggggttcgtggggggggggagtataaaacggggggcggtgtagatttgtattgagtagtacgtttcgggtcgtggggtgttaggcgatgatgtttattcgtttggtgtgtttttttagtattattatcggttttgttagcggggaggttagttcgttttttgggatttgttatatttgtggtagggatagggttatcgagtttagttttttgttggttttattgttggtttttttcggttatatttacgattttggtttagttagttttgtgttttattatgatcgtgtagtttttcgagtcgttggttatgatttcgtcgttgtgaggatattagtcgatgtttaggataggtttcgtgtgtttatatatcgtcgggtaggttttgttaatgcggttcgtttgtgggtacgagggggtagttagtgggttttatttttttcgaagttttggtttttttttttatggagtgggaatgatatgtacgtttcggtttataggtggtttagatgtgattgtgttttatttgttaggtgagtaggaaatgtttgttgtttttaattttgtttttatggtaataggttattttttatttgtgttaatatttggggcgataaatttgggttataatatttgtttagtagtgtgagaaacggtaagatgagggatttaaggtgtgtagaaaggtttagtaggggtggtcgaggtgttttttttttttttaattttgataggatttattttgtttagggggagtattagaaaggtattttttttattggtttttataattatcgttaggaatttggggttgacggcgtagaaggtgttgttttaggtaatacgggatacgcgaatgtttttatagtattggtcgtttttgatcggttgttcgaatatatgtcggaatttgttttgtcggattattttgcggaaggatatgtttgcgggatagagaggtttgggttagttcggtttattttaataattttagtt

SEQ ID NO: 2025 - DNA, 11172 bp, Artificial Sequence
  chemically treated genomic DNA (Homo sapiens)
aggttaaggtaggagaattttttgaattcggaagatggaggttgtagtgagttgagatcgcgttattgtattttagtttggtgatagagtaagattttgttttaaaaaaaaaaaaaaaaaaaaaaaaaaagagagaatagtttagtttttttatcgaatggggatatttttgagaaaattgtttgtttagtttatttaagttgttttgaagaaataatttttttagtgagtgggtgatcgggatttggtatggttataggtttttttataaaaatggatatatttgtgaattatgggttgtttattttttttttgtagagtggaaggtgttgatgtttttttataattgttttaattatacggatgtgatataattgatgatgttataatagtttgttataagtaatttttattatttggattgtaagatttttttttaagacgatatttttatttatacgtttggcgtttggattgggatgtttgaaggataagttttgttggagttgttaattagagtcgttaatatgtttttttaagatggtagttttgagatttaaagatgagtgtttttagtaaattagggttatatttatggttttttatgatttagttatagaagttatagtatgttttttttattatagtttgtcggtgaaaatagttataagtttgtttagatttaaggagagagaatttagattttatttattaatgagaggagtgttatagaaatatggtcgtttttaaaaattattataatattattttatttgtaaatatttattttagtttttattgtttttgtaataaattattataaatgtagaggtttaaaattatttgaattatttttttatagttttggaggttaaaagtttgaaatgggttttattaggttaaaattaagttgttagtggggtggtaattgtttttggaggttgtaggagagattttaattttttgtttttattggtttttagaggttgtttatatggattggttatagtgggtaatggatggtttagttttttttatattgtgttagtttgatattgatatttttttataaggatttttgtgattatgttgggtttatttagatattttaggatattttttttattttaaagttaggattagtaattttaattttttttggttgtgtataggttttagggattaggatgtggatatttttttgggggaaatgttattttgattattataatattttagtatgtatttttaaaataaggattttaaaattcgatataattaaaatattattatttatttgttatttgtgtattttttttagtttatttatgttttttgtttattttttaattggatggtatatttgtttattttcgagttttgagaattatttatatattttgaatataagttttttgttaattaagtggtttgtaattatttttttttagtttgtagtttgtttttttatttttttgataagggttttttgaagagtaagattttaaaattttgatgaaatttaatttgttgttttttttttttatggattatgtatgtttttggtattaaatgtgaatttttttttatttagttttaggttttaaaattattttttttatttattttattgttattttattttattttttaagatagagtttggtttttttatttaggttggagtgttttggcgtaattttagtttatagtaatttttattttttgggtttaatttttatttttttttaaatgttatgttttatataatatatatgttttagtttatttgatttttttaattttaatgggagtttgaattattttgattatgaagtttatgatttattttgagtaatttttgtggaaggtgtgaagtttacgttgagatttgttttttggtttttgatgtttaattgtttaggtattatttgttaaaaaggttgtttttttattattttttttataaatgtttggtagaatttgtttatgaaattagttaggtatgaagatgttttttaattatggtttttaattattgatttaattttttagtggaaatgaaattatttatattttttatattttttggtaatatatttttgtgttaataaattatatttttaataagggagaaaagggattatattttaaagtattagtagaatttagtaagtatgtgttagtttgagtaggggaagtagatttgggtttggattttgagggtgtttgataaaaggagttggaatataagtttcgataagagataatttattgatttgggagtatttttttcggatataggttgtaattttttgagaaggattttaggggttggtatagatttgttgttagaaaggttttagaagtttgagaaagtaatggtttatgtcgagtgaagttaaaatattcgaattgttatgatagatggagaaggaagggattaaaagagttatggaagtggttatgttggagtggatatattatatgaggttagaagatttattagattatgttttatgggaatgtattatttattaaagttattaggattttttggtgagaggagtattagtatttttaagaagttagtggtttcgttttttttataggttagggttgatggtaagagtggttgttataaaatttggtttattgatagttttttttttttgaagtagtggggttttttttttttgaagtagtggagtttttttgttttgaaatagtggaggttaggtagtagtatttaataaatagaagttaaggggttttaaatatcgttatagttagtaaggttggagtgataattaaggggttttgatttatggagagttgtggtaatggttaatagaataagtatttttagagggaaggtgaagtggaaatttttgaaattgttttttttttttaggaaaaaagagtagattagaaataatattgtaatttagtggaggggatggtggagattaatgttatttttaaggatataaaaaatgtaaggaaaatggttattattatatttatttaatttgtaagtttggtttttgtagaaattggatggattttagagaatgattgtagaatattgtgagtttaattaggtagtaatttgattgtagtttttataattaggtattgatatatgttaggtattaagtatatgttatgtatttattgatttggtaaatgtattttgttttataataagtaggaaagaggataagaaaaagtttttatttataagaatggaaaatatttatttatagtttttttgtagattattaatttttattttttgtatattgtagtttgaagagatttgaatttttatgtattttttaaaataatatattgatttattatattggtgatattatgttgatagggtatgatagataagaagtggttatatgttggatattttgtaagatatatgtattttagttgggtgcggtggtttatgtttgtaattttagtattttgggaggttgaggcgggtggattatttgaggtcgggagtttaagattagtttgattaatatggagaaattttatttttattaaaaatataaaattagttaggtatggtggtatatgtttgtaattttagttatataggaggttgaggtaggagaatcgtttaaatttaggaggtggaggttgcggtgagtcgagattgcgttattgtattttaatttagatgataagagcgaaattttattttaaaaataaaaagaaagaaagaaagaaaaatataaagaaaaaaacgtatgtattttatgaggtgggagataaattttttaattatttatggatttgttattttaggaaaggttttatgagtttagttgttaggggtatatagggatattttttttaaagtgaaaaataaattaatataatgtattagtataaggataggaaaataaattattggaatagaatagaaattttaaaagtagattataaaattattgaaattaataaatcgagtaaagtagattgttttttttaatgtggtgggttttatttaattagttgaagttttgaatataataaaaagtttgatttttttgtttgtaagagggaattttttttgtttgattgtttttatattgggatataggttttttttttgtttttgaatttaaattgaaatattatttttttttgggttttaagtttgtttatttttaggtttttgaatttaaattgggattatattagtagtttttttgggtttttagtttgttagtttattttgtagattttggaatttgttagtttttataattaaatgagttaattttttaattttttattttttatatatatattattggttttgtgtttttggggaattttgatttatataatggttttattaatgagttgttaaggtttattgggtatttatgtggtaaaaaataaattttgaatttttttttatattaaatataaaaattaattttagatggattgtaatttaaatattaatgttaaaataataaagtttttataagttaatataggaggatatttttattgttttaggataggggaagattttttattagattacgaaaggtttaattgtatataaaagattgaagtatgtgatttttttaaaaggaaaaataattgtgaaaatttattaaagtattttgttttattaaaggaggttgtgattatttatttttgagaaatatttgttatgtgaaaatataattatatgattatgtataattttaagtataatttttgggtgtttttaatttttggttatttatttggagatataatttttttataagttttttaattaataagtgaattattcgtttgtgtattttaaattttttaagtaattataggtaattttgggttgagaatttatatgatattattatagttaaaatgttttgtattagtatttttaatgtttttatggtttagtttgtttataaaaaggagagataatagtttatattttagaaggaggttaggagttgtgagtttttaagttttagtttattttgattatttttttgtttgtttagtattatgaagggttttgtagttgttttttttgttttcgtttgtattatggttttttgtttttgtgtataaggtgagtttgttatttatgtgttttgatggttttttgggtagaagttaggcgatattttttaagtgttgtggtttgaaaattttcgtgtgaaattagggatttttaaatggggttttaaagtgatattattgttttttttaagaaggttgaaaagtagtttattgatttgggtagtaggatgggagttagagaagttttattttattgagataaatgagatggttgaagtttaatttattgggttattagcgtgaggtagaatttaggtttatttagtttttattggtgttggtaagttttataatgattttagtagttttttagagtttaattttttgggtaatataaaagatgtttatattttttttagttattttgtgatttaatttattagaaaaaaaattttttaaggagagttaggagaagggtatagattatttagggagtttgattttttgtagcgtaaaataaagattaaaatggagagataagattagggaaattaaggagaaataaataaaaagttagattatttttagttttttttttttgtaggttttaattttgagttatgttgtttttttttgtttttttgtgattcgtttgggtttttttttttgagtaatttttgttgtttttgtttttttagataagatttatattttatgtatttgttgttttttttatattttttagtagatgtattgtaaattttcggttgtttattataaaattagtggtgagcggttttaaaattaaaattttatgatatattttaattattttatatagttaatatttatttagtttttattatatatttgttttttttgtttttttaaatttttttgtatttttgagttttatttgtaattattttttttttgtttaaaggaatttttttagtatttttattattgtgggttttttgatagtgaagtttttattttttgtttgtttggaaatgtttttattttatttttattttatttttatattggatatgaaagtttatagtagtttttattttttatttgtgtttacgtgttttttgttttttgttttatgggttgttttttttatatgttttatttgtagatagaaggattgatgttgatattacgttagggtaagagtattagttgttggagttagtaaatttgtagtggatatggagaaatataagagaggtaggagataatggggtgttttaatcgtgagggaattagtatttagaatttgagaaaaattaagtaaattttttttatttttgaaaagggattagtaagaagttgatgaagattttattgtttaggattgtgaagtagggtataaaaggaattaaggaagttaggtatttatttttgattttgagtgttttttttaaatttttgtttttgttttatttttatttttttgttttttttttagggagtatagtttttggaatggttggtttttgttttattttttttgggtaggaattttatttagtttatagagattttttttagtaagagattattatttttaaatcgttgtaggagtagagttttttaggagaattgaaggaattttgttatttttttattttaggaattaattagatttagagtttgtattttgtgaatgattgagttaggttttagtttttttaattaataatgggttttagtttttttttgttttttagatttaggttagatatttaagtttttagaaaatagtttagaatattttgaaattttttgtgaagttttttgattttatttagagaattttaatttataagaattaagtgatatggtttaaatgtttgtttagagtatagggaaataattttaaaatgaagaaaggataagggttaagagagttttacgggatagatgagatttgtgagttgagggttatggagaggagatggagggtattaaagaagatttgtttagtgttgggtaggtagaggagtgtaggtaatgttaaaataggattgggtatttattgttatttatatcgttttggggtttaagttatgtttttaattttttataggtaattttaaattatgaggagttggagattggggatgattagaggggaagatgttaagtgtatggtgttttgttttgagttgtatatgttggggtattttgggttttttaggggtttaggatgtataagagtaatttaattgtttatttgttggggttgaatgtgtagaaatgtttttgatagtgagagagggtgagatgttagtgttgaagttatacgtataaggagagatttttagattaatatttttattatagagtagttttttaatgttgtgttgtagtttttttgattatatggtgtgatgtaaatggttatgttatagcgttttgggtagtataagttatatttaaattatattttgggtgaaaaggattattatatcgtgttaatcggagtgtttttaagaaatgtttaatttatgaggaggacgttaagaattggtgttattaagaagttaagtttagttggtattttttattaagaatagatttatttgtgaatggtattatggttatttttttttatggaatagatatttttagtgttgtgtttttattgtatagaagtgatatgtaagatgatattttagaattttaagtagttcgagttgtgtttgatttagatttaaatggatagaatggaatagggaaagtttggattatgggaatgataagaatgatggggttaggtttttaattgttgtttgatttattgaatatttatagttttttataatatgttattattgggtttgattttgggtaatagatatgaatatgtatgatatatggggtgtttatatagattaggagttttagatgtttttatttttttatttaggaagtttatagttaggaaaatattttatagaaataattttatttatggagaaagttttttgtatatagatgtttggtataatttataataatgaaaaattggttaggtgtagtggtttatatttgtaattttagtattttgggaggtcgaggtaagtagattatttgaggttaggagttcgagattagtttggttaatatggtgaaattttatttttattaaaaatataaaaattagttgggtatagtggtgtacgtttgtagttttagttatttaggaggttgaggtaggagaatcgtttgaatttgggaagtgggggttgtattgatttgggattatattattgtattttattttgggtaatagagtgagattttatttaaaaaaaaaggaaaaattgaaattaatttatatatgttatagtagtgtatgataatattaatgtattaggtttaagtaaattaggtagtttttaaaaatattggaatgatttggaaaagttttttaatattaagtatagttatatgttgtataataatgttttggttaatgataaattgtatatattatatagtggtggttttataagattataattttgtatttgtattatattttttttatgtttagatatgtttagatatgtaaatatttaatattgtattgtagttgtttatagtatttagtatagtggtatgttgtataattttgtagtttaggagttataggttgtattatatagtgaaggtgtacggtagattatattatttaggtttgtgtaagtttatgatatttttataataataaaatagattaatgataagttttttagatgtatttttgttattaagtgatgtatggttgtataaataaaaaaatataaaattaaaatttgtattatgataatagtaatgtttttttttattagatatagtaagaagaaggaaaaaagtaaatgagtaaatagtattattataagtttagaaaaaaattgtattggaaagaaatatattaaattgttttttaaaaaaaaaaagtggttaggtttgggtattagaattttttttatttttaatgaaattttttttttaggttttgtattagaatgtatatatgttataatagggaatgtagaaaaaaatttttatatttttgttttcgtttgtttgttgtttatttagttttgagattttaaatgagtttttatttttttttgtattttatgtgtttttaaaattagttttattgttttttggtgtaatttatagtttatataataaattatataaaaagttatttgaattaaaaatattagtaatattgttttttttgtatttttatgagattttttcgtatgtttgtggatgagatattatgaggatgtgatgattgagaaagtagcggttattttgggattacgaggtgataagtttaaataagaaaagttaataaaatggtgggggaaggggagatgttttaagaagtttgagtttttgatgatataattgagttgttaaataaatttagggaggattatttgtttaaatttatttatttatttaattatttatttgagataaagttttattttgttgtttaggttggagtgtagtggtatgattagagtttattgtaggtttgatttttcgggttgaagtaatttttttgttttagcgtttaaagaagttgaaattataggtatgtttagttattttaaaaaaaaaaaaatttatagagatagggttttattatgttgtttaggttggttttatatttttggttttaagtaatttttttattttggtttttttaaatgttgggattataggtatgagttattatgtttggttttgatgtttatggtatatttatgttgttggaatagttggggaggttattagaaggttttgtttaatgggagaaaggttttatttaaagatttgtttttgtgagaaggtattagttaatttagttttagggtgatattagtattttatttttttttattgtggaaattatttttttattaagggattaattgaagtatttttgtaaatagtttgaatttttgtggtgagttgaagtttttttggtttgtgtaatgtatagtatgatattagtattatgattaaaaaatttttttttttagagaggattaggaaaaattaatgggtattaggtttaatatttgggtgatgaaataatttgtataataaatttttatgatatgagtttatttatgtaataagtttgtatatgtatttcgaatttaaaagtttaaaaaatgaaaaaagaaataaaatttttttttagtttttttaagtttatattttttaatattttaaggttgtttgtaaagagaagagatggttgagattttagaaggaggtagcggttataagttttgagtttagtttttttcggtagttatgggagtttatattttgtttagtattttggggatttttgtagttgtttttgttgtttttttttttattgaggttttttgtttttaggttcgttgttttttgtgtgaatttgttttttgtttttgtgtttttattgtttggttatggtttggattttattgttcgagtttatttttaagatttttaaatatagaatattagagggattttagggattatttttcgaggaggatttttttttttaagaggttttagtaattttgttttttatttttgggagatagagggagagtgagttttattttatggatgagaaaatggaggtttacggggattttgataagaggtaggatttgggtttaattggtttttagtggtgtggttttggttgtttttatgaatttagatggaattttttaaggagagatgggatgggaaatagtttgtttagaaaattaaatttttagtaaagagatatagagatttagaattaagatagttagagaatgagaaatattaagagaaagatgtagaaattaaaatgttagggaaaagaagaaatgttagtttttttttggatttttttgtttttatatttttattttaagcggtgatattttttagttttttttgatttttaaggaaagggattaggagtagttggtttgttttgtgaataatgatttgggatttttttgttttgttttttgtagt

SEQ ID NO: 2026 - DNA, 11172 bp, Artificial Sequence
  chemically treated genomic DNA (Homo sapiens)
attgtaagagataggatagaaagattttaagttattgtttataaggtaagttagttgtttttggtttttttttttgagagttaggaagaattgggagatattatcgtttggggtggggatatagggataaagagatttagaaggaagttggtatttttttttttttttgatattttaatttttgtattttttttttggtgttttttattttttggttgttttggttttgggtttttatgtttttttattggaaatttagttttttgagtaaattattttttattttatttttttttggggagttttatttgaatttataaggatagttaaggttatattattgagaattaattggatttagattttattttttgttaaaattttcgtgggtttttatttttttatttatagaatgggatttattttttttttgttttttagaggtggagaatagagttgttgaaattttttaggaagaaaaatttttttcgggaaatagtttttgaaatttttttgatgttttgtatttggaggttttagagatagattcgggtagtggggtttaagttatggttagatagtaggggtataagagtaaaagataaatttatataagggatagcgggtttgggggtagagggttttagtgaagaaaaggatagtaagggtaattgtaggggtttttaggatgttgggtagagtgtgagtttttatggttgtcgggaagagttgaatttaggatttgtagtcgttgtttttttttggggttttagttattttttttttttataggtagttttggggtattagaagatataaatttggggagattgaggaggaattttgtttttttttttattttttaaatttttaagttcggggtatatgtgtagatttgttatataggtaaatttatgttatgggagtttgttatatagattattttattatttagatattaagtttagtatttattagttttttttgattttttttgaaggggaaaattttttaattatgatattggtgttatgttgtgtattgtataaattaggagagttttagtttattataaagatttaggttatttgtaagaatgttttagttgattttttggtggggaaatggtttttatagtgaaaggaggtgagatgttggtgttattttgagattgggttagttggtgtttttttataagggtaggtttttagataaagttttttttttattgagtagaattttttgatagtttttttagttgttttaatagtatagatgtattatggatattagagttaggtatggtggtttatgtttgtaattttagtatttggagaggttaaggtgggaggattgtttgaagttaagagtgtgagattaatttgagtaatatagtgagattttgtttttataaatttttttttttttaaagtagttgggtatgtttgtagttttagtttttttggacgttgaggtaggaggattgttttagttcggaaagttaagtttatagtgagttttgattatgttattgtattttagtttgggtaatagagtaagattttgttttaaataaataattaggtaaataaataaatttaaataggtggttttttttgagtttgtttaatagtttagttgtgttattaagaatttaggttttttaaaatattttttttttttttattattttgttggttttttttatttgagtttgttatttcgtggttttaaaatggtcgttgtttttttagttattatatttttataatgttttatttataagtatacgagggagttttataggagtataggaagagtaatgttattagtgtttttagtttaaatagttttttatatgatttgttatgtgaattatagattatattaaaaagtagtaaagttaattttgaaaatatataaaatatagaaaagaataaaaatttatttagaattttaaagttgggtaggtagtaggtaaacggaggtaggaatgtgagagtttttttttatattttttattgtggtatatgtgtattttgatgtaaaatttgaaaaaaaaattttattgaaggtaggaaaaattttagtatttaaatttagttattttttttttttaaaaaatagtttggtatatttttttttagtgtagtttttttttaggtttatgatagtattgtttgtttatttgtttttttttttttttttattgtgtttggtgggggaagatattattgttgttatgatataggttttaattttgtatttttttatttatatagttatgtattatttaatgataaaaatatatttgaggaatttgttattagtttgttttgttattgtgggaatattatagatttatataaatttagatggtgtagtttatcgtatatttttattgtatggtatagtttgtagtttttaggttataaagttgtatagtatgttattgtattgaatattgtaggtaattgtaatgtaatgttaagtatttgtatatttaaatatatttaaatatagaaaaggtatagtataaatatagaattataattttatgggattattattgtataatatatgtagtttgttattgattaaagtattgttatgtagtatatgattgtgtttaatattaaaagatttttttaaattattttagtatttttaagaattgtttaatttatttaagtttagtgtattaatattgttatgtattattgtaatatatgtgggttggttttaattttttttttttttttagatggagttttattttgttgtttaggatggagtatagtggtgtgattttaggttaatgtaatttttattttttaggtttaagcgatttttttattttagttttttgagtagttggaattataggcgtgtattattatgtttagttaatttttgtatttttagtgaagatgaggttttattatgttggttaggttggtttcgaatttttgattttaggtgatttgtttgtttcggttttttaaagtgttaggattataggtgtaagttattgtatttggttaattttttattgttataagttgtgttaaatatttgtatgtaaaaaattttttttataagtgaggttatttttgtaggatatttttttagttgtgggttttttgggtgaaaaaataagggtatttaaggtttttgatttatatagatattttatatgttatgtatatttatgtttattatttagagttaaatttaatgatggtatattgtagggagttatgaatgtttaatgaattaaatagtagttaaaagtttggttttattatttttgttatttttatagtttagattttttttattttattttgtttatttgggtttggattaaatataattcgaattatttaagattttggggtattattttatatgttatttttgtgtaatggaaatataatattagaaatatttgttttataggaggaaatgattatggtgttatttataaatagatttgtttttgatagaaggtattagttaagtttggttttttggtaatattaatttttgacgttttttttatgagttaagtattttttagaagtatttcgattaatacgatgtaatggttttttttatttagggtgtggtttaaatgtgatttgtgttgtttagaacgttgtggtatgattatttatattatattatgtggttagaggagttgtagtatagtattagagagttgttttgtggtggaagtgttaatttgaagatttttttttgtacgtatgattttaatattaatattttatttttttttattgttaaaaatatttttgtatatttagttttaataagtgagtagttgagttgtttttgtatattttgaatttttgggggatttaaggtattttaatatgtataatttagagtaagatattatgtatttaatatttttttttttggttatttttagtttttagttttttatggtttagagttgtttgtaaagggttgaggatatggtttggattttagaacgatgtaggtggtagtgagtgtttagttttgttttggtattgtttatatttttttgtttgtttaatattgaataggttttttttggtgttttttattttttttttatggtttttagtttataagttttatttgtttcgtgagatttttttgatttttgttttttttttattttagagttgtttttttatgttttggatagatatttaagttatattatttaatttttgtggattaagattttttaagtaaaattaaagaattttataaaaggttttaaaatgttttgggttattttttgaggatttagatatttaatttagatttgaaaggtaggagagggttaggatttattgttagttgggaaaattggggtttaatttagttatttataagatgtaaattttgggtttagttggtttttagggtgaggaagtggtagagtttttttagtttttttgagaagttttatttttatagcgatttagagatgatggttttttgttgggaaaagtttttgtagattgaatgaagtttttatttaaaagagatggaataaaggttagttattttaagagttatattttttgaagagggagtaagggagtgagagtaagatagaggtagagatttaaaagaaatatttaaagttaaggatgaatgtttgatttttttagttttttttgtgttttattttatagttttgagtagtgaggtttttattaattttttgttggtttttttttaagagtggaagaaatttatttggttttttttaggttttggatgttggtttttttacggttaaggtattttattgttttttgttttttttatgtttttttatatttattgtaaatttgttgattttagtagttggtgtttttattttggcgtaatgttagtattagtttttttgtttgtaaatagggtatatggaggagataatttatgggataagggataaggagtacgtaagtataagtaggaggtgggagttattatggatttttatatttagtgtgaaggtaaaatgaaggtaaaatgaagatatttttaagtaagtaaaaaatggagattttattattagaagatttatagtaatgaaaatattaagaggatttttttaggtagaagaaaagtgattgtagatggagtttagagatgtagaagaatttaagaggataggaagagtaaatatgtgatgaaaattaaatgaatattgattgtataaagtaattaaaatatattataggattttaattttaagatcgtttattattggttttataataggtaatcgaaaatttgtagtgtatttattgggaggtgtaggagaagtagtagatgtatggggtgtgaattttatttgagggaataaagataataggagttgtttaggagaagaagtttaggcgggttataaaggagtaaagggagatagtatagtttagagttgaggtttgtaggaaaagaaagttggaaataatttggttttttgtttgtttttttttaatttttttagttttgtttttttattttagtttttattttacgttatagggaattaagttttttgaatagtttatgttttttttttaattttttttggggaattttttttttaatagattaaattataagatagttgagaaaagtatagatattttttatgttatttaaggggttgaattttaggagattgttgaggttattgtaaaatttattagtattagtgagaattaaatagatttagattttattttacgttaataatttaatgaattagattttaattattttatttattttagtaggataaaatttttttgatttttattttgttgtttagattaatagattgttttttaatttttttgaagaaaataatgatgttattttgaaattttatttgaggatttttaattttatacgagggtttttaggttatagtatttggaagatgtcgtttgatttttgtttagggagttattaaagtatatggatgatagatttattttgtgtataggagtagagggttatggtgtagacgaggataaggagggtagttgtaaggttttttatgatgttgggtaggtagagaagtggttagagtgagttggggtttggaaatttataatttttggtttttttttggggtatgagttgttgttttttttttttataggtagattggattatgggaatattggaggtgttgatgtaagatattttaattatggtggtgttatgtgagtttttagtttagggttgtttatggttatttgaaaggtttagggtatataaacgagtggtttatttgttgattgaggggtttatggagaagttgtatttttagatgggtgattaggagttggaagtatttagggattatgtttaggattatgtataattatgtgattatgtttttatatgatagatattttttagaaatgagtggttatagttttttttgatagagtagaatgttttaatggatttttataattgtttttttttttaagagagttatatgttttaattttttatatatagttaggtttttcgtgatttaatgagaaatttttttttattttaaggtaataaagatatttttttatgttaatttgtagaagttttattgttttagtattaatatttaaattataatttatttggagttgatttttatgtttggtgtgaagaaggatttaagatttattttttgttatatgaatatttaatggattttggtaatttattggtaagattattgtataagttaggattttttagagatatagaattaatggtgtgtgtataaaaaataagaaattagagaattggtttatttaattatgaaggttgataagttttaagatttgtagggtgagttggtaagttggagatttaggagagttgttagtgtagttttagtttgagtttaaagatttgagaatgggtaggtttaaggtttaggaagagatgatgttttagtttaagtttaaaggtaggagaaaaatttatgttttagtgtgaaggtaattaggtaagaggaatttttttttataggtaggagggttaggttttttgttgtatttagaattttaattaattgaatgaagtttattatattagagagggtaatttgttttattcggtttattgattttaatgattttgtggtttgtttttggaatttttgttttgttttaatggtttatttttttatttttgtgttaatatattatgttaatttgttttttattttgaaggagatatttttgtatgtttttgataattggatttataaaattttttttgaaatgataagtttataaatagttaaaagatttattttttattttatggaatatatacgtttttttttttgtatttttttttttttttttttttttgtttttgagatggagtttcgtttttgttatttaggttggagtgtaatggcgtaatttcggtttatcgtaatttttattttttgggtttaagcgatttttttgttttagttttttgtgtagttgggattataggtatgtgttattatgtttggttaattttgtatttttagtagagatggggtttttttatgttggttaggttggttttgaattttcgattttaggtgatttattcgttttagttttttaaagtgttggaattataggtatgagttatcgtatttagttggaatatatatgttttatagagtgtttaatatatggttattttttgtttattatgttttattaatatgatgttattaatgtaatggattaatgtgttgttttgagagatatatgaaaatttagatttttttagattatagtatgtagaagatgagagttaatagtttataggaaaattgtaagtgaatattttttatttttatgaatgggaatttttttttatttttttttttatttgttatgggatagaatgtatttgttaaattaataggtatataatatgtatttaatatttggtatgtgttagtatttggttatagaagttgtaattaggttattatttggttgagtttatagtgttttatagttattttttaggatttatttagtttttgtagaagttagatttgtaaattaaatagatatgataataattattttttttgtattttttgtatttttaagggtggtattagtttttattattttttttattagattgtaatattgtttttaatttattttttttttttgggagaagggggtagttttagagatttttattttattttttttttagagatgtttgttttattaattattgttataattttttatgggttaagattttttgattgttattttaattttgttggttataacgatatttagaattttttggtttttgtttgttaaatgttgttatttagtttttattgttttaaggtaagaaagttttattgttttaaggagagagggttttattgttttaaggaggaagagttattaatgggttaagttttgtgatagttatttttattattagttttagtttataaagaaggcgggattattaattttttagaaatgttggtgttttttttattagggagttttggtggttttggtgaatagtgtatttttatggaatataatttggtgagttttttggttttatgtaatgtatttattttagtatgattatttttatgatttttttaattttttttttttttatttgttatggtaattcgggtattttaattttattcggtatgagttattgtttttttaggtttttggagtttttttgataataaatttgtattaatttttggggttttttttaagaggttatagtttatattcggaaagaatatttttaagttagtaagttgttttttatcgaggtttatattttaattttttttattaagtatttttaaaatttaaatttaagtttattttttttgtttaggttgatatatgtttgttaaattttgttagtgttttagagtatagtttttttttttttttattaggaatataatttattgatataagaatgtgttattagaagatatggaaaatatgaatggttttatttttattaaggaattaaattaataattaaaaattatggttagaaaatatttttatatttagttggttttataagtaagttttattaaatatttatggaaaaaataatggaaagatagtttttttaataaatagtatttgaataattggatattaaagattaaaaaataaattttaacgtaaattttatattttttataaaaattatttaaaatggattatagattttatgattagggtgatttaaatttttattaaagttggggaagttaaataaattgggatatgtgtgttatgtaagatatgatatttagaaaaaaataagaattgagtttaggaggtggaggttgttatgagttaagattgcgttagggtattttagtttgggtgagaaaattagattttgttttaaaaaataaagtaaaataataataaaataaatagaaaaaataattttaggatttaggattaggtaaaaaaaaatttatatttgatattaaaagtatgtataatttataaaagaaaaaagtaataaattagattttattaaaattttaaaattttgttttttaaaaagtttttgttaagagaatgaaaagataaattatagattgggaaaaagtaattgtaaattatttaattgataaaggatttgtatttagaatatataaataatttttaaaattcgaaagtaagtaaatgtattatttagttagaaaatggataaaaaatatgaatagattgaggagaatatatagatggtaaataagtaatggtattttgattgtgtcgggttttaaaatttttattttaaagatatatattgaaatattgtggtagttagaataatattttttttaaaagaatatttatattttaatttttgagatttgtatatagttagaaggaattaaggttgttaattttgattttgagatagggagaatattttggagtatttgagtaagtttagtataattataaggatttttataagggagtgttagtattagattgatataatgtgagaagaattggattatttattgtttattatagttaatttatgtgggtagtttttagaagttaataaaggtaagaaattggaattttttttatagtttttaaaaataattgttattttattaatagtttggttttagtttagtgaggtttattttagatttttgatttttagaattgtaagagaataatttaagtggttttaagtttttatatttgtggtaatttgttatagaagtaatagaaattaaaataaatatttatagataaaataatgttgtagtggtttttaaagacggttatatttttgtgatattttttttattgatagatgagatttaggttttttttttttgaatttggataggtttgtggttgtttttatcgatagattgtagtggaagagatatgttgtgatttttgtggttaggttataaaaggttataagtatgattttagtttattaggaatatttatttttgagttttaaggttgttattttgaaagggtatgttgacggttttagttgatagttttagtagagtttgttttttaaatattttagtttaggcgttagacgtgtgaatgaggatatcgttttagaagaggattttataatttagatagtgaaggttatttatgataggttattgtgatattattagttatattatattcgtatagttagagtagttgtgaaagagtattagtattttttattttataggagagaaataggtagtttatggtttatagatatatttatttttgtgagggagtttgtggttatattaagtttcgattatttatttattgaggaaattatttttttagaataatttgaatggattgagtaagtaatttttttagaagtgtttttattcgatggagaagttgagttattttttttttttttttttttttttttttttttttgagatagagttttgttttgttattaggttggagtatagtggcgcgattttagtttattgtaatttttatttttcggatttaagagatttttttgttttagttt

SEQ ID NO: 2027 - DNA, 7862 bp, Artificial Sequence
  chemically treated genomic DNA (Homo sapiens)
  unsure 131: n is a or g or c or t
gaggttgtagtgagtcgagatggtgttattgtattttagtttgttgttagagttagattttgttttagattaattaggtatataagtagataatttagtatatatgtaggttggtgtcgtttatttataantaagatttcgttttaaaaaaaaaaaaaaagaaataaagttatgttatattagtaatattggataattttggaggttatttaagagaaataagttagttatagaaagataaatattgtatgttttatttatatgtggagttttaaaaagttgattttataaaagtagagagtaaaatagtggttagtagtggttgagaagtgttaggagaagggggtatagttaaaggttgattaaaaaatataaaagtagtcggttaggtatagtggtttacgtttgtaattttagtattttgggaggtcgaggcgggtagattacgaggttaagagaatgagattattttggttaacgtggtgaaattttatttgtattaaaaatatataaatatataaaaattagttgggtatggtggcgtatatttgtagttttagttatttgggaggttgagataggagaatcgtttgaatttgggaggtagaggttgtagtgagtcgagatggtgttattgtattttagtttgatgatagagtaagattttgttttaaataaataaataaataaataaataaataaataaataaataaataaaaataaataaaaaataaatataaaagtatagttagttaggaggaatgagtttagtgttttatagtattgtagggtgattataattaataatttatagtatgttttaaatagttaaacgagtagattttgaatgtttttagtataaataaatgataaatgaggtaatagataagttaattatttgatttgattattatatattgtatatatgtaatggaaatattatattgtatttataaatatgtataattattatgtgttagttgaaaataattttataaaatatatatttgtatgtttatttttaggtttttatagttttttaattttatttatttatttatttttttgagataaggttttgatagggttttgttttgtcgtttagattatattgtagtggtataattatagtttattgtagttttgattttttatatttaaataattttaagttttattttttgatttatatagattaattgtattatattttaatgtgaagtttttattttgaagtgaatttgggattatgtaatatgaatgtttgtttattatataatttagtaagttttttttataaatatttatagttttttttataatttattaaatatgtatgtttagttaatttgtttagtataaaattttttttttatttttttttttttaaagtgtttattttttgttttagttagagggtttgttttttaggttgtgggttgtaattttttttagaaataaagtttttttttttaaatttaagattttgtgatttttattttgatatatgagatttttttagtcggtttttagtttatttttgaaagattgaatggttagatttttgatattttttttaagtattttttatttgattttagttatttatttttaagtattattagttttagtattatatgaataaattgggaaagattaaggaattatggattatatattttaggagaattttttatttttaagaaaatttttgggggtttttttttgaaattttttattgttgttttgaatttaaaagatttttgaataaggtataatagtgattaaagaagtagatttattaatttgagggtttaattatataaggtatttgtttagttttttttttgtttttggggtaggaaggtaattgagataagaagttaggagattttgagtaggtagagaaggatagaaagatagaatgtatagtgagtttaatatattaaaatataatttttttttttataaattagttgtttaagttttttatttgttttttgtaagaagttatttagaaaggtaatttttggtttatttaattttttagaagtttttgtatgttaattaaaatatatttttttgtttttgaggtgttttttgtttttttttaatattttattttattttttttagatttagttttgtaaatatttttttttttttaatgttttgtaagtgaataattttatttaggttaaaatttttttattttgattattgttaatttttagattatttttggtaggtttatttatttttttggaaaagtgtagattttgggtttataggtttttatatatgaaattggttggagttttaggtggaggagttttagattttttggatttaaatgaaggtattattttttgtatttttatatttttttttattataagttttttattggatttagttttgtttttataggttttgtattggatttagttttagtttttgttgtaatttttggatttagtttagattaaaaatgtttaaataaattttaagaatttgatataagttgtagagtttgtatttaagtagggtttataagtggcggtttttaaatgtgtagtgagaagttttgagtataaatggtttagtgtgtgaagtaggtttacgggtattggttattaatttgttttgaatttttataagtaataatttatatgtagtgtatttattatttatagataggtggtaggagacgaagattaggatttattgtgagttaatttttttaaagtttagaaagttgtttaggtggatgaaatttttattgcgtattttttatttatattatagataagagatttcgaagagtagtttatttagattatatattatatgttatatgaattattgggttaaagtgttgaaggattttttatttttaggggagaattggaatagagtttgggttattttagttagtttttttttattttaggatgttgtattttagttcgttatgtagttatttttgaaaattataaaggaaaaggagggagaagtgggtaggtttaaggttatatagagaattgttttgtataatgaagtatttgtatttgtttagttattgtttttagaggttattattgagggaataggggggtttttagattttatttttgatattagaattgttaaaagagaaattttatataaaataaattcgagtttattcgagtaagaaaataatttatgaattaggtagtatgtagaagtagaagaggtttagagagttttatttagtagtatgagtagtaagtttttatagatttaatacggaagtagaaaaattatttgattgggttttggtttgtttgtataggagttggtgttatagagttgattttaagttaatggtttttttatttgttttagtattttatatttgaatttaagggaaagtttgaagggagtttagtatcgaaataaattagtaaatgtttgggggtaaataatagtgtttttattaagtaattatgatatatatattttttttagtagtggtagagtagttttgtagagttagataggaagatgatggtttggttacgtatgtttagttgttggttcggtttattttataggtattaattagtatttggtttatagtgtgttaagtattattttaggtgttgaggatgttaaggtgattttaataatgtttttgattttttaaagttaattttggtgggatgttgaatataggatgtaatttaaggtggtgatgagaggtatatagataaatcggaaggtataagttagttattagtgaggggaaattttagataacgtagatatataaggttaggtggagaaatggatgattgagttaaatttgggtaaggagtttggtaaatgaagatagaagtatgatttagttaggggaaattataataaaagacgtttggtgggaattgtttgttttttaatttttaaaaattagttaaaggtttatatatattattttattttaatattattggtagaaagattttatttttatggagaggggatttgaggtttagaaaggagacgatttgttatcgttttttatttaagggtaaatatggggatattttattttattttaaagtttaagattttgtattttaggttttttgtttgatttgaaattattgagttaaaagggatcgaaagattttaatggaattatcgatgggaaaattgcggtttaggaggaaatatattaagtaaaattgtatcgtatttaggtggttagtttttagattggggtttttttgtttcgttagattatttttcggcgataagggttttaggttttcgaaatttcgttattcgcgagtgatttgtagcgtaggggtttttgttgtttcggaaatttttaaaggtgggcgggtcggggattaagttttttagggatggagaaggaaacggggttaaggaaaaggatatcgttattttgggtagagtacgtacggttttagcgattcggatatggtgaggggcgcggaggttcggggtggattcgaggtttttatatatgtggtaggttgtagtaattcgttatttacgaggattcgtttaaggtttagagcgcgtcgggttttttttttcgatttcgtcgtcgttcgattggtcgtagcggaagtcggcgcgcgattttacgttgcgttttcgttacgttttgacggttgttcgataaaacggatattaaaattgtattttttattgaatatagtagcgtttattgtggcggtatatttgaatgcgaaaattaaagttaaaatattttttagcggttaaaagagttttaagtttaggcgaatttgtcggttcgttcgtcggaaatgcgggtttttttgtcggaagttgtttttttattattttgtggttcgttatggcggcggtgttgaggttgggtacgggatgcggggtttttgattgaaggggtaggttaagtggaggtattagggacgtcgcgcggtatagaagaggattagtttggacgtcggggacgttgttatgtacggcgcgagcgggggtcgcgttaaattcgagaggaaaagcggcgcgaaggaggaggtcgggttaggcggtgtcggcggtgggggtagtcgagtggagtttttggttttcggttatgtttgtaagttgtttcgggacgacgagcgggttttggtttaggaatagggatagtattttattttttggatgggggattataagatttttatcgataggtcggtttttttttttattcgtcgatttttttttttttttattcgtttgatttcgtttgatgttgatttgattgtaaggattgtagagagttttttggagttagcggggatttgggggatatttttttttttgtttttatttttttttggtgttttggtggggagggggacggtgaaatttgttttaaggtatcggttggaattgcgtgtcgcgttcgttttcggagggatcgtttttggtttcgtagtttttttcgattttttattttgtcgttgggttgtagttggcgatttcgcgcggtgaaagtagttagtgtttagggtttttttttgagtgtatttgggtttgtcgttcggcgatgttatggggtcgtgcgttgtttttttatttgtcgcgtttttattgttcggtgtattgggagggtattttgggaggcgtgtttttattttttcgaatcgtcgtttattgagatagtggttagaagtgttttttggatttgtgagttagttttaatttgttatgtttttagagtttttagtggagcgttcgtattttgtcggtatgacgtttgatttttcggtgataattcgacgagtttgatagattgaggtagtgagtaaagttgttcgttagttggtggttatttgatttcgtgcggattttggttttgtttttggaagagatagtgtttttagggttggttttattgttttttaagattgaagggtggagttgggatatagatgtgttgtttttttttaaattaaatttgttttaggtcgttattcgagggtgtttagcgattatgggtagtgggggtttgggattagggatttttaaaggcgtttgatttgaaaaggataatattatatgatgtaggtggtttgtttttttttttttttttatttttttaatttttttttttttcgtttttgggttttggggttgttgtggggtggtttttttttttttttgtttgttcggttatttttggggttcggattgaaaagttaattatgattaattattaaattgtggaatagtttttttacgtgaagaaagtttatcgtttgagattattaaaattggattttttatagttttggagtatgattgtagggatgatttttgagttggttagaatggatatattaatgattaaataggtttttttttatttttgacgtttttttttggaattagagttcgaaaacgagaattggtgaagggagggtcgcggaattagattatgtttggatttgatggtttcgtgttgtgtttaagcgtgttgtgtttttatattatggtttatattgaatgtgtcgtttgagttgttaggtttgtttttttaaagtgttatttgtgttatttattattaaagtttggtaagtaatgaagtttgagttttttgtatagtttttttattattttgtatatgatttgagttaggttttttaaaattggtggggagtaaacgtcgtatatgtatatgtataatatttttaataataatttatatttgtaagttaaggaggtttatattaaaatttaattaattttgaaatttaatgaaatgtagtaatttgattattttggaattttgggttttttttttgtaaatgttttttttggtttatattaatatttttggtttttattataaaagttagtattaaaaaaataagtagatttttgtttgtttttttatatttgtttttgaaattttaaatttgagtgttttaagtaaagtttattaatttatttatttattatttgatagttatacgttgatagtatttttattgaattttttatgttaaaagtatagtagaaagtgtttttattatttatttggttaaattattgtttggtttatgtaagagaaatatggaagtgtttttatgtatgttatttttttgagggtataaagtttagaaggaaatattgatattatattttttaatagttttgttttgtttttagtgaatttttttaaattgtatgtatatgttattgttttaatgtatgtgtgtttttttattacgtaatttagtatttatttttttagttaagtggttagggggcgagtttagttaagattttatttttaatggacgtaagtttttttggtgaagattttttttgagagttcgggattagtagaaagaagcgaggaaatttcgatcgtttggtttttacggataggtatttatgtatttggtttgtgtgaatgtaagttatgatatttaattttttagaaaaaaataataattttttgtaagtggtattgaatggttgattaaattataatggtaagaattgttagtgaagtgggtattatttttgttattaatggattgtttgtttttagttataaatgttattttattgtggaaaggaatttagagtttgttaagataatttgagtttaaaagtaggtgagatatgattatttaaattaaatataaatttgggaagagtttttatatttgttttaatatttttgtttattttaatcggtaagtatgtgtgtgtatatatatatatatatataaaatattatatacgtatattagtttagacgttaatttttttttattgattagtttgtttatattataga

SEQ ID NO: 2028 - DNA, 7862 bp, Artificial Sequence
  chemically treated genomic DNA (Homo sapiens)
  unsure 7732: n is a or g or c or t
tttgtaatgtgaataagttggttaataaaaggaaattaacgtttagattggtgtgcgtgtgtgatgttttatatatgtatatatatatatatatatatatttatcgattaaaataaataaaaatattaaaataagtataaaaattttttttagatttatatttaatttggatagttatattttatttatttttaaatttaagttattttaataaattttaaatttttttttatagtaagataatatttataattaaaggtaaataatttattaatagtaaaaatggtatttattttattggtagtttttattattatggtttggttaattatttaatgttatttgtaaaaaattattatttttttttgaaaagttaaatattatagtttatatttatataaattaaatatataaatatttattcgtaagaattaaacggtcgaaattttttcgtttttttttgttagtttcgaatttttaggagagatttttattaaagaaatttgcgtttattggaggtaaaattttggttaggttcgttttttagttatttggttgaggaaataagtgttgggttacgtgatagagagatatatatatattggaatagtgatatatatatgtagtttaaggaggtttattgggaatagagtaaaattattagaagatatggtattaatatttttttttgaattttatatttttaaggaaataatatatatgaagatatttttatgttttttttgtatggattaaatagtagtttggttaaataagtaatgggagtattttttgttatgtttttaatataaaggatttaatgaggatgttgttaacgtgtaattgttagataataaatgaatgagttagtgaattttatttaaaatatttaggtttagggttttaaaaataaatgtagagaaataaataaaagtttgtttatttttttaatgttgatttttgtaatgggaattaaaaatattaatgtagattaaaaaagatatttataggaaaaaggtttaaaattttaaggtagttaagttattgtattttattaaattttaaaattaattggattttgatgtaaatttttttaatttataaatgtagattattattaaaaatattatatatgtatatgtgcggcgtttgttttttattagttttggaagatttaatttaaattatgtatagaatgataggaaaattgtataaagagtttagattttattgtttattaaattttaatgataaataatataagtgatattttggaaaagtaagtttgataatttaggcgatatatttaatataaattatggtgtgaaggtatagtacgtttgagtatagtacggagttattagatttagatatgatttgatttcgcggttttttttttattagttttcgttttcgagttttaattttaaaaggaaacgttagggatggaaaaaggtttatttggttattaatgtgtttattttggttagtttagaggttatttttatagttatgttttagggttatgaagaatttagttttaatggttttaaacgatgggttttttttacgtggagagattattttatagtttaatggttggttatggttagttttttagttcgggttttagaagtagtcgaataggtaaaaaagaaaaaaaattattttataataattttaaaatttagagacgaggggaagggggattgaaaaaatgggaagaaagaggggagtaaattatttatattatgtaatgttattttttttaaattaaacgtttttagaaatttttaattttaggtttttattgtttataatcgttagatattttcgagtgacgatttaaagtaggtttgatttgaaaagaaataatatatttatattttagttttattttttagttttaagagatagtgaaattagttttaagaatattattttttttaagagtaaggttagggttcgtacgaagttaagtggttattaattgacgggtaattttgtttattattttaatttgttaaattcgtcggattattatcgggaaattaaacgttatgtcggtaaagtacgggcgttttattgagggttttgggggtataataggttaaggttaatttataggtttaagagatatttttagttattgttttagtgagcggcggttcggaagaataaaggtacgttttttagggtatttttttagtatatcgagtagtgagagcgcggtaagtagaaaagtagcgtacgattttatggtatcgtcgggcggtaggtttaggtgtatttaggaaaagattttgggtattggttgtttttatcgcgcggaatcgttaattgtagtttagcgatagggtgaggggtcgagaggggttgcgggattagagacgattttttcggagacggacgcggtacgtaattttagtcggtgttttagggtaggttttatcgtttttttttttattagaatattaggaggaggtggggataggggagggggtgttttttagattttcgttggttttagaaaattttttgtagtttttgtagttaagttaatattagacgagattaagcgggtgagggaagggaaggatcgacgggtggggagaggaatcgatttgtcgatgaggattttgtggttttttatttaggggatgaggtgttgtttttgtttttgagttagggttcgttcgtcgtttcggaatagtttgtaggtatagtcgaaaattaagagttttattcggttgtttttatcgtcggtatcgtttggttcggttttttttttcgcgtcgttttttttttcgggtttggcgcggttttcgttcgcgtcgtatatgatagcgttttcggcgtttaggttggtttttttttgtgtcgcgcgacgtttttgatatttttatttggtttatttttttagttaaagatttcgtatttcgtatttaattttaatatcgtcgttatagcgggttataaaatggtggaggggtagttttcggtaggagagttcgtattttcggcgagcggatcggtagattcgtttaggtttggagtttttttagtcgttaggaaatattttggttttaattttcgtatttaggtgtgtcgttataataggcgttgttgtatttagtggaaagtgtaattttaatgttcgttttatcgggtagtcgttaggacgtggcgaaagcgtagcgtgggatcgcgcgtcggttttcgttgcggttagtcgggcggcgacggagtcggagggaggggttcggcgcgttttgggttttgggcgagttttcgtgggtggcgggttgttgtagtttgttatatgtgtggaggtttcgggtttatttcgagttttcgcgttttttattatgttcgagtcgttggggtcgtgcgtgttttgtttagggtggcgatgtttttttttttggtttcgtttttttttttatttttaggggatttggttttcgattcgtttatttttgaaggttttcgaggtagtagaggtttttgcgttgtaaattattcgcgggtggcgagatttcggaaatttgagatttttgtcgtcgggagatggtttggcggggtagggagattttagtttggagattggttatttggatacggtgtaattttgtttggtgtgtttttttttgggtcgtagtttttttatcggtggttttattaggatttttcggttttttttagtttagtaattttaggttagataaagggtttggagtgtaaaattttaggttttgggatgggatgggatatttttatgtttgtttttgagtggaaaacgatgatagatcgttttttttttgggttttagattttttttttataaaaatggaatttttttattagtgatgttgaaatgagataatgtatatgaatttttaattgatttttggaaattaagaaataggtagtttttattaaacgttttttgttgtggttttttttgattgggttatgtttttgtttttatttgttaggttttttatttaagtttaatttagttatttatttttttatttggttttatgtgtttacgttgtttggagtttttttttattggtggttaatttgtgtttttcgatttgtttgtgtattttttattattattttaggttatattttgtgtttagtattttattagaattagttttaagagattagggatattgttggggttattttagtatttttagtatttagaatggtgtttagtatattgtgggttaaatattggttaatatttgtagaatgagtcgggttagtagttgagtatgcgtggttaggttattatttttttatttaattttataagattgttttgttattgttgaggaagatgtatgtgttatggttatttgataaaaatattgttgtttgtttttaggtatttattagtttgtttcggtgttgggttttttttaagtttttttttgggtttaggtgtggggtgttaaagtaaataaggaggttattagtttgagattaattttgtaatattagtttttatgtaagtaaattaaaatttaattaagtaatttttttgttttcgtgttgggtttataaaagtttgttgtttatgttgttgagtggaattttttgaattttttttgtttttgtatgttgtttgatttatgaattgtttttttgttcgaataaattcgaatttgttttgtgtaaagttttttttttaatagttttggtgttagaaatgggatttgaaggtttttttatttttttaatgatgatttttgggaatagtgattaaatagatgtaggtgttttattgtgtaggatagttttttgtatagttttgggtttatttattttttttttttttttttttgtagtttttaagagtaattgtataacgagttgggatgtaatattttgagatagggagggattggttgaagtagtttaggttttgttttagtttttttttagaaatagaaggttttttaatattttagtttagtgatttatgtgatatgtggtatgtaatttgggtgggttgtttttcgggattttttatttgtggtgtaagtgaggaatacgtagtagagattttatttatttgggtaattttttgagttttggggggattggtttatagtgagttttagttttcgttttttattatttgtttataggtaataaatgtattatatgtaaattgttgtttatgagaatttagaataggttggtaattagtgttcgtgggtttgttttatatattgagttatttgtgtttagggttttttattgtatatttggaggtcgttatttgtaggttttgtttggatataaattttataatttgtgttaaatttttaaagtttatttgagtatttttgatttgagttgggtttagaagttataatagaaattgggattggatttagtataaggtttatgggagtaggattgagtttagtaggaggtttatggtaggaaagggtatgagaatatagggaatgatgtttttatttggatttaaggagtttgaaatttttttatttggaattttagttaattttatgtataagaatttatgaatttagagtttgtatttttttagagaaatgggtgaatttattaaaggtaatttaagagttaatagtggttaaagtgaggaagttttaatttagataaaattgtttatttgtaagatattagaaaagaaaggatatttgtaggattaggtttgaaaggaataaaataaaatattaagaaaggataaaaaatattttagaaataaaaggatgtattttgattgatatgtagaggtttttaaaaggttaaatgaattaaaaattgtttttttaaatgattttttataaaaagtaaatgaaaaatttaagtagttaatttatgagaaaaaaaattgtattttgatgtattgaatttattgtatattttatttttttatttttttttgtttatttagaattttttaattttttattttagttatttttttattttaaagataaaaagaaagttaaataaatgttttatatagttaggtttttagattaataagtttgtttttttaattattgttatgttttgtttagaaattttttgagtttagagtaatagtgaaaggttttaaaggaaagtttttagaaatttttttggaggtaaaaaatttttttggagtatatgatttatgattttttgattttttttaatttatttatatgatattgggattggtgatatttgaaaatggatggttgaggttaaatgggaggtatttgagaaagatattaaagatttaattatttagttttttagggatggattaaaaatcggttagggaaattttatatgttaaaataaagattataagattttaaatttggaaaggagaattttatttttgagaagagttgtaatttatagtttgggaagtagattttttggttgagatagaaagtaggtattttgaaggaagaagggtgggagaggagttttatgttaaataggttggttaaatatatatatttaataggttataggaggagttatgaatatttgtgaaaggggtttgttaggttgtgtggtaagtaaatatttatgttatatggttttaagtttattttagggtggagattttatattaaaatgtaatataattagtttgtgtaggttaaaaggtgaaatttaggattgtttgagtgtggaaggttaaggttgtagtgagttgtgattgtgttattgtagtatagtttgggcgataaagtaagattttattaagattttgttttaaaaaaataggtgaataaataagattaaagaattgtaaaaatttaagaataaatatgtaaatgtgtgttttgtaaaattgtttttaattgatatataataattgtatatatttatgggtatagtgtgatatttttattgtatgtatataatgtgtagtgattaaattagataattagtttatttattgttttatttattatttatttgtgttgagaatatttaaaatttgttcgtttagttatttgaaatatattataaattgttaattatagttattttgtagtgttatggaatattagatttattttttttaattagttgtatttttgtatttgttttttatttatttttatttatttatttatttatttatttatttatttatttatttatttgagatagagttttgttttgttattaggttggagtgtagtggtattatttcggtttattgtaatttttattttttaggtttaagcgatttttttgttttagttttttaagtagttgggattataggtgtgcgttattatgtttagttaatttttgtatatttatgtatttttagtatagatggggttttattacgttggttaggatggttttatttttttgatttcgtgatttgttcgtttcggttttttaaagtgttgggattataggcgtgagttattgtgtttggtcgattatttttgtattttttaattaatttttggttatgttttttttttttgatattttttagttattattagttattattttattttttatttttataagattaattttttaaggttttatatatgagtgagatatatagtatttatttttttgtggttgatttattttttttaaataatttttaaggttgtttaatgttgttggtatgatataattttatttttttttttttttttttaagacggagttttanttgtagatgaacgatattaatttatatatatattaagttatttatttatgtatttgattgatttgagatagagtttagttttgataataggttggagtgtagtggtattatttcggtttattgtaatttt

SEQ ID NO: 2029 - DNA, 5269 bp, Artificial Sequence
  chemically treated genomic DNA (Homo sapiens)
ggaaagttattgtggggtgtttgttagtaattgtgaagaaagtggtttgtaatttggaaattattaaaaattattggggtacgttttttggtgtttaattgttaattttggattttttattatttaatttattttttgggagagagatttttttttttttaattagttttaaagaataaatgtgaagtttaagaaataatgagtataaaagtgttttgaacgttataaattttttggaatgtttttatttatattatattaatttgtggtataatgattaaaataggattgattttgatagggagtaaattttttaggttattaggatgtaaatggtattggaagaattttttttttattgttgggaataaaaataatatagagtttttttttattagttggatatagtgtaggtaatataaatggtttttttttaaattagtgaaaagggagtaatgatttttaaagttttatgtttgtcgtagttttttatgttttttattttaattttaggggatttttgtattatttatgtttttttttgtatttttataaggttaatattagagaatgtttagatagaagttagatatggataatgatttaggttgatttttatgggaagttaggaaaagcgatatattgttttttgattaggttgggtaatttaataatttatttttattggggattttttattatttgtttattaattgtagaaatattttttttttttatattttataaataattttttgtgaattgatttagagtgtaaagtaggtaagatatgtgtatttataagattattaggaggaattggtaattttgttttatgatttttttttgattttattatttggtgttaaaaataaatttatatgtttatttatgtttaaaatggtttatttagaattaatttatatatagatagggagagagagtttaaaagttaataatttatgttatttttaaatttttttttaaataaagttttatattgtggtttattttttgtggttaagttgaattaattgtttaggagttgagttatatttttgaagttttgttttagttattttagtaaggtttattttttgtttttagatatattttaatttttaaaatgttaatatgttaaatttgtaggttgttttttatagattattattttttaaaaagatgaaggattttatttgttgagttaggtatgatgttgatggtgttaggaagttgtgagaattttttatttagttttttataaattgaaggttaaattatttagttttttttagttaatgaattttttgtttttttttagaattaaaattgtaaaggtttgtgatattttttttttgtttattaatggaggtgataggagaggaagttaataaaattttttagtgttataagggataaggaaaagagttgtgttttataattggttttttaatgtcgttatgtttattgatgatttttgttggtttgtattgaggataaagttttttagaattagttagaagaggatttagttagatttttgtgaaagaaagtttatgtgttattttagtgtcgtatttatgtttgttatggagtaagacggtggaagatatttaaatttttagtgttttaatttttttacggataataaagaaggagagagggagaagttggaagttattttattttttaattttaggaggtagtgtagggtttattggggattagaataggtttgtagaaatagttttggttattagtaattatgaaattagatggttttagaagtttatggggagaatttttttttttatgaggttgtttgggggaaaatagattgggtgttattatgttgtttaattgatgtaaatttttagaagaagtttttatatgagttttttaaatttattaattttttatagtatttttaaatggtgttaaaaatatatttgggggtgggattagagttggggtaggttcgggttttttggtaaattttagtttatgtttattatattatattttatttttaataagattaaaattttttttaatttaatagtatagtaatcgttaaaagtatattttattttttatggtaatttgttgggtgatttttgtttgaagatatttttgtttattaaattgttttaatatatatatgtttgttaaattataagtatataatttttaataaatagattttattttggggttaatttaggtaatttgttgattttaggtggggatagagttttttttattacgttattttggtttttaaagttgtttgaaatttagataattaaaaagttatttaagaaatttagaatgatttgtttgtaagaagaggaaggatttttagtttagggtaataattatgaataatattttttgaataatagtaataataattagaaaggattgatttttagaaattttttttaagttaaagtttttattattatggttttaattttttttttttttttttaattttattattattatattttaagttttagggtatatgtgtataatgtgtaggttagttatatatttatatatgtgttatgttggtgtgttgtatttattaattcgttatttagtattaggtatattttttaatgttatttcgtttttttttttttagtttataatagtttttagagtgtgatgtttttttttttgtgtttatgtgttttttttgtttaatttttatttatgagtgagaatatgcggtgtttggttttttgtttttgcgatagtttattgagaatgatgatttttaattttatttacgtttttataaaggatatgaatttatttttttttatggttgtatagtattttatggtgtatatgtgttatatttttttaatttagtttattattgttggatatttgggttggttttaagtttttgttattgtgaatagtgttgtaataaatattcgtgtgtatgtgtttttatagtagtatgatttatagttttttgggtatatatttagtaatgggacggttgggttaaatggtatttgtagttttagatttttgaggaatcgttatattgatttttatattggttgaattagtttatagttttattaatagtgtaaaagtgtttttatttttttatattttttttagtatttgttgttttttgattttttaatgattgttattttaattggtgtgagatggtattttattgtggttttgatttgtatttttttgatggttagtgatggtgagtattgttttatgtgttttttggttgtataaatgttttgagaagtgtttgtttatgttttttatttattttttgatggggttgtttgtttttttgttgtaaatttgtttgagtttattgtaggttttggatattagttttttgttagatgagtaggtcgcgaaaatttttttttattttgtaggttgtttgtttattttgatggtagttttttttgttgtgtagaagtttttgagtttaattagattttatttgttaattttggtttttgttgttattgtttttggtgttttatatatgaagattttgtttatgtttatgttttgaatgggtaatgtttaggtttttttttagggtttttatggttttaggtttaacgtttaagtttttaatttattttgaattaatttttgtataaggtgtaaggaagggatttagttttagttttttatatatggttagttagtttttttagtattatttattaaatagggaattttttttttattgtttgttttttttaggtttgttaaagattagatagttgtagatatgcggtattatttttgagggttttgttttgttttattgatttatatttttgttttggtattagtattatgttgttttggttattgtagttttgtagtatagtttgaagttaggtagcgtgatgtttttagtttggtttttttggtttaggattgatttggttatgcgggtttttttttggttttatatgaatttttaagtagttttttttaattttgtgaagaaagttattggtagtttgatggggatggtattgaatttataagttattttgggtagtatggttatatttacgatattgattttttttatttatgagtatggaatatttttttatttgtttgtatttttttttattttattgagtagtggtttgtagttttttttgaagaggttttttatgttttttgtaagttggatttttaggtattttattttttttgaagtaattgtgaatgggagtttatttatgatttggttttttgtttgtttgttattggtgtataagaatgtttgtgatttttgtgtattgattttgtattttgagattttgttgaagttgtttattagtttaaggagattttgggttgagattatgtttttgtttgtttgttattggtgtataagaatgtttgtgatttttgtgtattgattttgtattttgagattttgttgaagttgtttattagtttaaggagattttgggttgagattatggggttttttagatatataattatgtaatttgtaaatagggataatttgattttttttttttttaattgaatattttttattttttttttttgtttaattgttttggttattggagaggaggagtattttttagatagttgcgtgttttagagaagttagtttcgttaattttttaagtttaggggatgagattttgttgaatcgttgttttattttggttggagttatagttttttttatcgcggggcggggttaaaatgtttttttttttaagggagtaggtagttttttttagttatttattttattaatttttattttttcgtttttttttattaattttttttttttatattgttttttgagtttagggaatttttttagtattttaaagtttgagttttttgttagtcgggagggatgaatgtagataaagggagtgtagaaggtacgaggaaattaaagtgttttgtattttttagttttcgcgtttttatttagtttaggaattcgcgaatttttttttgattattatgagtttttcgtttagtcgcgcggttcgtgtttcgggtttttcgggttttttgtgcgcgttgttcgcgttgttgtttttgttgacgtcgtcggggtttttcgttagcggtgagagtttttggtattggggtgtattttagtttttgcggggtcgttgcgttttagggaatttttttagtaatttgttttataaaaatgttttttttttttagt

SEQ ID NO: 2030 - DNA, 5269 bp, Artificial Sequence
  chemically treated genomic DNA (Homo sapiens)
gttggggaagaaagatatttttatagggtaggttgttgggagagttttttggaacgtagcggtttcgtagaggttgggatgtattttagtgttaggagtttttatcgttggcgaggggtttcggcggcgttagtaggagtagtagcgcgagtagcgcgtataaggagttcgaaggattcgggatacgggtcgcgcggttggacgggaggtttatagtggttaagagagggttcgcgggtttttgagttgggtggaggcgcggagattggaggatatagagtattttggttttttcgtgttttttgtattttttttatttgtatttatttttttcgattggtaggaaatttaagttttgggatgttggggaaattttttgaatttagggggtagtgtggaaagaaggggttggtggaggggggcgggaggatgggaattggtggggtgggtggttgggaggagttgtttgtttttttaagggggaggatattttagtttcgtttcgcggtggagggagttgtggttttagttaaaatagagtagcgatttagtagggttttattttttgggtttgaggggttagcgaggttggtttttttgaggtacgtagttgtttgggagatgttttttttttttaatggttaggataattaggtaggagaaggaaataaagggtatttaattaggaaaagaggaagttaaattgtttttatttgtaaattatataattgtatatttagaaaattttatggttttagtttaaaatttttttaagttgataagtaattttagtaaagttttaggatataaaattaatgtataaaaattataagtatttttatatattaataataaataaatagagatatggttttagtttaaaatttttttaagttgataagtaattttagtaaagttttaggatataaaattaatgtataaaaattataagtatttttatatattaataataaataaatagagagttaaattatgagtgaatttttatttataattgttttaaagagaataaaatatttaggaatttaatttataagggatatgaaggatttttttaaggagaattataaattattgtttaatgaaataaaagaggatataaataaatggaagaatattttatgtttatgggtaggaaaaattaatatcgtgaatatggttatattgtttaaggtaatttatagatttaatattatttttattaagttattaatgattttttttatagaattggaaaaaattatttgaaagtttatatggaattaaaaaagagttcgtatggttaagttaattttaagttaaaagaattaagttggaggtattacgttatttgattttaaattatattataaggttatagtaattaaaatagtatggtattggtattaaaatagagatatagattaatggaatagaatagagtttttagaaataatgtcgtatatttataattatttgatttttgataaatttgagaaaaataagtaatagggaaaggattttttatttaataaatggtgttgggaaaattggttagttatatgtagaaagttgaaattggattttttttttatattttatataaaaattaatttaagatggattaaagatttaaacgttagatttgaaattataaaaattttagaagaaaatttaggtattatttatttaggatataggtatgggtaaggtttttatgtataaaatattaaaagtaatggtaataaaagttaaaattgataaatgggatttaattaaatttaagagtttttgtatagtaaaagaaattattattagagtgaataggtaatttataaaatgggagaaaattttcgcgatttatttatttgataaagggttaatatttagaatttataatgaatttaaataaatttataataaaaaaataaataattttattaaaaagtggatgaaggatatgaatagatattttttaagatatttatgtagttaaaaaatatatgaaataatgtttattattattggttattagagaaatgtaaattaaaattataatgagatattattttatattagttagaatggtaattattaaaaagttaggaaataataggtgttggagaggatgtggagaaatgggaatatttttatattgttggtgggattgtaaattagtttaattagtgtggaagttagtgtggcgattttttagggatttagaattataaatattatttgatttagtcgttttattattgggtatatatttaaaggattataaattatgttgttataaagatatatgtatacgaatgtttattgtagtattatttataatagtaaagatttggaattaatttaaatgtttaataatgatagattggattaagaaaatgtggtatatatatattatggaatattatgtagttataaaaaaggatgagtttatgttttttgtagggacgtggatgaaattggaaattattatttttagtaaattatcgtaaggataaaaaattaaatatcgtatgtttttatttataggtgggaattgaataaggagaatatatggatataggaaggggaatattatattttggggattgttgtgggttggggggaggggggcgggatagtattaggagatgtatttaatgttaaatgacgagttaatgggtgtagtatattagtatggtatatgtatagatatgtaattaatttgtatattgtgtatatgtattttaaaatttaaagtataataataataaaattaaaaaaaagagagaaaagttggaattatagtagtggaagttttgatttgagaaaaatttttgaaagttaattttttttaattattattattattatttaggaaatgttatttatgattattgttttaaattgagagttttttttttttttgtaggtaggttattttaggttttttgaatgattttttgattatttggattttaaatagttttagaagttaagataacgtgatgaaagaggttttatttttatttgaagttaataagttgtttgaattggttttaaagtgaaatttgtttattagaaattgtatatttgtagtttagtaagtatatgtgtgttgaggtagtttaataaataaaaatatttttaaataaaaattatttagtaaattgttatggaagataaaatgtatttttggcggttgttatgttattgaattggaagaggttttggttttattgggagtgaagtgtagtatggtgagtatagattgaagtttgttagggagttcgggtttgttttagttttggttttatttttaggtgtgtttttgatattatttggagatgttgtaggaggttgatgaatttgaggggtttatgtgaaagttttttttagagatttgtattaattgggtagtataatagtatttagtttgtttttttttaaataattttatggggggaggaattttttttataggtttttggaattatttaattttatgattattggtgattaaggttgtttttgtagatttgttttagtttttagtgagttttgtattgttttttgaaattgaagggtgaagtagtttttagtttttttttttttttttttttgttattcgtggaggagttaaagtattgaaggtttaagtgttttttatcgttttgttttatggtaggtatgagtacggtattggaatggtatatagatttttttttatagaagtttaattagatttttttttggttggttttgaagaattttgtttttagtgtaggttagtaaaggttattagtaaatatgacggtattgagaagttagttatggaatataatttttttttttgttttttgtgatattggggaattttattaatttttttttttgttatttttattggtgagtaagaaagaggtgttatagatttttataattttgattttggaaggaaataagaaatttattggttgaggaaggttgggtggtttggtttttagtttgtgggaagttaaatgagaagtttttatagttttttgatattattaatattatatttgatttagtaaatggaattttttatttttttggggagtggtaatttgtagaaaatagtttgtagatttagtatattgatattttaaagattagaatgtgtttaaagataaaagataagttttgttgaaatggttaagataaaattttaaaaatgtgatttagtttttaggtaattaatttaatttaattatagggaataaattatagtataaggttttgtttaaaaaaaagtttagagatgatataggttattgatttttaaattttttttttttgtttgtatgtgggttagttttgaataagttattttaaatataaatgaatatatgaatttgtttttggtattaaatggtaaaattagagaggaattatgagataagattgttagttttttttgatggttttataagtatatatgttttatttgttttgtattttgaattaatttataaaggattatttatagaatgtaagaagaaaaaatatttttgtagttgataagtaagtaatagaaagtttttaataaaagtgagttgttgggttatttaatttaattaggaagtaatgtgtcgttttttttggttttttatgaaaattagtttgggttattgtttatgtttggtttttatttaggtattttttgatgttggttttgtaaaaatataggagggaatatgaatgatgtaaagattttttgaggttaagatggaaagtatgaagaattacgatagatataggattttaaaagttattgttttttttttattagtttaaaggaaaattatttgtgttatttgtattgtgtttagttggtagagaaaagttttgtgttatttttgtttttaataataagggaaaaatttttttaatgttatttgtattttgatggtttgaaaagtttattttttgttaaaattaattttattttagttattgtattatagattaatataatatgaatgaaaatattttaaagagtttgtggcgtttaaaatatttttatgtttattattttttgagttttatatttattttttgaggttgattaaaaaaaaaaaaattttttttttagagaatgagttaagtaatagaaaatttagaattggtagttaaatattagagaacgtgttttagtaatttttaatagtttttagattataaattattttttttatagttgttggtaaatattttatagtggtttttt

SEQ ID NO: 2031 - DNA, 6012 bp, Artificial Sequence
  chemically treated genomic DNA (Homo sapiens)
tagtttatttcgtagttttcgcgttttgcgtttttagattttgcgttgtaaaggagtgtcgggattagggttttattattcgggtttttgggtttcgagagtttttaaaatttggtgtaaaatttgtgtgtgtgtaggtggggagtggatattgtttataatatttttaaggggtacggttatgaaagttttagaaaattgtaagaattttttgttcgatggtttttttttttcggtagaatatttaggtagtgttggggtgatagtagggaaggttttttagatttttttaagttttttttttttttttttttgagatagattttttttttttagagataagtgaatatttatttttgggtttttttttttattttaagttttttttaaaataaggttttaagaatttttaaatttaattatgtttttgggtttggtcgattggtgtaggagttttagggagttttgtataaatgttagagttatttatttatcgatattaaattaaaacgttggaatttttttttggaaattggattgtgattagaggtgtttgttatgaatataagttattgttttttttttttttttttttttttttttttttttttgagagagagttttgttttgttgtttaggttggagtgtagtggcgtgattttggtttattgtaatttttgtttttcgggtttaagtgatttttttgttttagttttttaagtagttgggattataggtgtacgttattatgttcggttaatttttgtatttttagtagagatagcgttttattatgttggttaggttggtttcgaatttttgattttaagtgatttattcgtttcggttttttaaagtgttgggattataggcgtgagtttttgttttttttttgattttttttttttagtttttgaagataaagttggaaataattttttttgaagatatttgataaaaatttttaaaaaaataaaaatatatgtttttattatttatgtttttattttattaataaaaatttattgtagtttggtatttgggtttagtttagttggcggatgagttgattgatgcgtttattttgatagttaggtgtgtttatttttttgaggaagtttattgtatttttggtagtatgacgggttattgagaggtagaaagggcgtaataattatgagattttttggaaatgtttttttgggacggtaattttatgattgaggttttttaagtaaacgatattaaatttttttaggtgttttttaattattgtgttgtttgttagaggaatggttttattttttatttttgattttggtttgtttatgttttaaaatgagtttttggatagattttagatttggaaatttttaggttatataaggttttattatacgtagtatttttaggttttggggggtgatttttataaagatattattaaaaattttttttaggtaaagttttataatggttttttgtattagtaaatttacgttattaattttttcgatgtgtataataaaggttaaggaatgtttatttggtaattttaaggtatgatgttttatttttagttgtttgagatgtattttgttatatttttgttattaggaattatgtaggaatgattttagttgtttaaatttgagtttttttttttttttttgttttttttttgataaaagtgtttgttttgtttgggtggttttgagggtttggtaagttttttttttaggagattttttagaattaaagggatttttttttgtttttgttcgttatttttttagtgttgtagttatcgattattaagatagagttttttgttgttgtttaggttggagtgtaatgatgtaatttcggtttattgtaatttttgttttttgagtttaagagatttttgtgttttagttttttgagtagttggaattatagatgtttgttattatgttcggttaatttttgtatttttagtagagatggggttttattatgttggttaggttggttttgaatttgtgattttaggtgatttattcgttttagttttttaaattgttgggattataggtgtgagttatcgtgtttagttttaagttttttattaagttattggtaagatatttagttttttggtttttagtttttttttaaaatgggagttgttataatttttattttatagggttgttgtaataattaaatgagatgtaatggttaaataatgatgttaaaagagtttagtataagttttataggagtaggggcgtaataaatgttgttattgttggtttagggtgaggtagggatttatttgtgtttaggtaatatgatttattgttgggtagtgttaatggttaaggagtgtttttagggttggtagtagttttttttttttattagttggtgatttttagtggttttggttttggttttgtgaatgataaattgggttttttttttgtttttagttattgaattttatatttgaggatagttattggtttgttttagttttagttaagttttttttttttttagtttaatatttttggttgttattattaattagtttttatttggttaaatttttaattggtattttttttttggttttttttggtttgttatttttttttttttattgtatggtggttaagaggggattggatatttaaggtaaggattttattttttagagaatagtaatttttttggttgggttttttgatttaaggggatattattataagtttgtggatagaatgaaaattgttagtgtatttgttttttttttttttttttttttttttttttttttttttttttttatttttttttttttttttttttttttttttttttttttttttttttttttttgatggagttttgttttgttatttaggttggagtgtagtggttgcgattttggtttattgtaattttcgtttttcgggtttacgttatttttttgttttagttttttgagtagttgggattataggtgttcgttattacgttcggttaatttttttgtatttttaatagaaacggggttttatcgtgttagttaggacggtttcgattttttgatttcgtgatttatttgttttggttttttaaagggttgggattataggtgtgagttatcgcgtttagtttttttttgtttttaatagaaatttttattttattagattttttagtgttatttttatgtaattagttttttggaattttaatataagatttagtatttatttttggtgaattttattttgttggtttttatttaattttataatttgttaaggttgttttgaatttgttttagttatttattgtgttggagtttttttttagttagtagttatttgtagggtgaagatggttttttttatttttatttaagggatttataataatgttaggtagtttagggttaggatggagttttatagagattttttttagttttattagaattgtttaggtttaaattcgagtttttaggatttagtttatatttacgttttgtttataaggataaatgttaaatgttttgttggattaagataagttgtttggagttatttaatcgtaatgatagaaggaggaggtaatttggttggtatttaaggattacggtttaatttttttttaaatgtatttagttatttaaatagaaatttgtttcgaaatttgttatgtatggatgttaaaatattttttttagaatttattatttatatttttgggtagaattaaatattaatagtttttgttgttgtattgtttattaatggttttttttaatatttggcgttaagtttaaagttttttttatggttacggggtgtttttgtttttattttttattttttgaatttttatttatatttgtttttagttatatgggtttttttgttttttttgaatatattaagttagtttttattttagggtttttttattggttgttttttttttttagaatattttatttttatgtagttgtatggtttagttatttatttttttgtttattttattaaagaggttttttttgattattttatttaaaatgttagtagtatttttttaaatatttattatatatataaaaatatatatatatataaatatatatatatatatatatatatatatttttttttttttttttttttttttttttgagacggagtgtcgttttgttgttaggttggagtgtagtggtacgattttggtttattgtagttttcgttttatgggtttaagtgatttttttgttttagttttttgagtagttgggattataggtgtttattatcgtgtttggttaatttttgtatttttagtagagacggggtttttttatgttggttaggttgttttttaatttttgatttgaggtgatttgttcgttttaattttttaaatgttgggattataggtgtgagttatcgtattcggtttatttatatataatttattattttttcgttatcgttatttttatttatagtattgattgttattaattatatatttatttgtttattttattttttatttttggaatgtaagttttaggagggtagggacgttgttttgtttattgttgtattttagtattggaatagtgttaggtatgtggtagtgagaggtgatattgtgttggtagtttttatagttttcgttcgttttcggggatttttttgtttgggtttttattttggcggtatttgagaagttttttagtttatcgttgtattgtgggagtttttttttgggttggttaagatcggagttagtttttttagtttgtagggaggtgtggagggagaggtttaagcgggaattcgggttgcgttcgttgtttgcgggttagttggagtttcgggtgggcgtgggtttggcgggtttcgtattcggagtagttagtcggttttgtcggtttcgggtaatgaggggtttagtattcgggttagcggttgtagagggcgtattgggttttttagtagtgttagtttattattgggttttagttgtttttttgtagggtagggttggggatttgtagttcgttatgcgtgagttttttatttattttatgggtttttgtgcggttcgagtttttcggatgagcggcgttttttgttttacggcgtttagttttattaattatttaagggttgaggagtgtgggcgtacggtgcgggattggtacgtagttttatttgtagtttttgtgcgggatttattgggtgaagttagttgggtttttgagtttggtggggttttggagaatttttatatttagtttagggattgtaaatatattaatcggtattttatttagttcgaggtttgtaaatatattaattagtattttgtgtttagtttagggtttgtgagtgtattaattaatattttgtatttagttgttttggtggggttttggagaatttttatgtttagtttagggattgtaaatatataaatcggtattttgtatttagtttaaggtttgtaaatatattagttagtattttgtgtttagtttagggtttgtgagtgtattaatcgatattttgtatttagttgtattggtggggttttggagaatttttgtgtttatattttgtatttaattaatttgatggggacgaggagaatttttgtgtttagtttagggattgtaaatatattaattagcgttttgttaaaataggttattaggttttattatttagtaggatgtgggtggggttagataagagaataaaagttggttgttcgagttaatagcggtaattcgttggggtttcgttttatatcgtaagagttttgtttttttgttttttgtaataaattttgttattgtttattttttgggtttatattgtttttatgagttgtaatatttatcgcgaaggtttgtagttttatttttgaagttaatgagattacgagtttatcgggaggaacgaataattt

SEQ ID NO: 2032 - DNA, 6012 bp, Artificial Sequence
  chemically treated genomic DNA (Homo sapiens)
gagttgttcgtttttttcggtgggttcgtggttttattggttttaggagtgaagttgtagattttcgcggtgagtgttatagtttataaaagtagtgtggatttaaagagtgagtagtagtaagatttattgtaaagagtaaaagaataaagtttttacggtgtggaacgggattttagcgggttatcgttgttggttcgggtagttagtttttatttttttatttggttttatttatattttgttgagtggtagagtttagtggtttgttttgatagggcgttgattggtgtgtttataatttttgagttagatataaaggtttttttcgtttttattaggttagttagatatagagtgtagatataaaggttttttaaggttttattagtgtagttagatatagagtgtcggttggtgtatttataaattttgagttagatatagggtgttgattggtgtgtttataaattttgagttagatatagagtgtcgatttgtgtatttataatttttgagttagatatgaaggttttttaaggttttattagagtagttagatatagagtgttgattggtgtatttataaattttgagttagatatagggtgttgattggtgtgtttataaatttcgagttagatagagtgtcgattggtgtatttataatttttgagttagatataaaggttttttaaggttttattagatttaggaatttagttggttttatttagtggatttcgtataggggttgtaggtggagttacgtgttagtttcgtatcgtgcgtttatattttttagtttttgggtggttgatgggattgggcgtcgtggagtagggggcgtcgtttattcgggaggttcgggtcgtataggagtttatggagtgggtgggaggtttacgtatggcgggttgtaggtttttagttttgttttgtaggaaggtagttaaggtttagtggtgggttggtattgttgggggatttagtacgttttttgtagtcgttggttcgggtgttaagttttttattgttcggggtcggtagggtcggttggttgtttcgagtgcggggttcgttaagtttacgtttattcggaattttagttggttcgtaagtagcgagcgtagttcgggttttcgtttgggtttttttttttatatttttttgtaagttaagggagttggtttcggttttggttagtttagaaaggggtttttatagtgtagcggtgggttgaagggttttttaagtgtcgttaaagtgggagtttaggtagaggagttttcgagagcgagcgagggttgtgaggattgttagtatagtgttattttttattattatatgtttggtattattttagtgttgagatgtagtagtgaataaagtaacgtttttgtttttttggaatttatattttagaggtaaaaagtaaagtaaataaataaatgtatggttagtagtagttagtgttgtgagtgaaaataacggtgacgagagagtgatagattgtatgtgggtgggtcgggtacggtggtttatatttataattttagtatttgggaggttgagacgggtagattattttaggttaggagttggagaatagtttggttaatatggagaaatttcgtttttattaaaaatataaaaattagttaggtacggtggtgggtatttgtaattttagttatttaggaggttgaggtaggagaattatttgaatttatgaggcggaggttgtagtgagttaggatcgtgttattgtattttagtttggtaatagagcgatatttcgttttaaaaaaaaaaaaaaaaaaaaaaaaaaaaatatatatatatatatatatatatatatttatatatatatatatttttatatatatagtgggtgtttggaggggtgttattaatattttaggtagggtggttagggaaggtttttttgatgagataagtagggagatgaatgattgagttatgtagttatatgaagataaaatgttttggaaagaaagagtagttagtgaaaaggttttgaggtaggagttggtttagtgtgtttaaaaaaagtaaggaggtttatgtggttggaggtaggtgtgggtgagggtttaggagatgggggatgggggtaggaatatttcgtggttatggggaggattttggatttgacgttaagtgttgggggaagttattgatgaataatataatagtaagagttgttggtatttgattttatttaaaggtgtaaatagtaaattttgaagagaatattttgatatttatgtatggtaagtttcggaataggtttttatttgggtgattgaatgtatttaagaaaagattaagtcgtgatttttgaatattagttaaattgttttttttttttgttattgcgattggatggttttagataatttattttgatttagtaaagtatttggtatttgtttttatagataagacgtaaatgtgagttggattttagggattcggatttagatttgaataattttgataaagttgaaggagatttttatgaagttttattttggttttgggttgtttggtattgttatgagttttttgaatggaggtagaggaagttatttttattttgtagatggttgttggttgggagggagttttaatataatgggtgattgaagtagatttaaagtagttttgatagattgtaaagttgggtggaaattaataagatgaaatttattagggatgagtgttaagttttgtgttgaggttttaaaaaattggttatataagaatagtattgggaaatttggtgagatggaaatttttgttgaaaatagagagaggttgggcgcggtggtttatatttgtaattttagttttttgggaggttaaggtaggtggattacgaggttaggagatcgagatcgttttgattaatacggtgaaatttcgtttttattaaaaatataaaaaaattagtcgggcgtggtggcgggtatttgtagttttagttatttaggaagttgaggtaggagaatggcgtgaattcgggaggcggaggttgtagtgagttaagatcgtagttattgtattttagtttgggtgatagagtaagattttattaaaaaaagaaagagagagagagagagagagaaaagaaaagagagagagaaatgaaaagaagaagggaagaaggaagggagaaagaaagaagagagatagatatattggtagtttttattttgtttataagtttataatgatgtttttttaaattagaagatttaattaggagggttgttgttttttgggaaatggggtttttgttttaggtatttagtttttttttggttattatatagtgagaaagagaaggtgataaattagagagaattagggaagagatattagttaaggatttggttaggtggaaattgattgatgatgataattagaaatattgaattggaaggaaagagagtttggttgggattagggtaagttaatagttgtttttaaatatgggatttaatggttgaggataaaggagagatttagtttattatttataaagttagaattaagattattgagaattattaattggtggaagagaaaggttgttgttagttttggaaatattttttagttattagtattgtttagtaatggattatattatttgggtataggtgagtttttattttattttgggttaatagtaatagtatttattacgtttttgtttttgtgaggtttgtgttagatttttttgatattattatttggttattatattttatttagttgttatagtaattttatgaggtagagattatgataatttttattttaaaggaagattgaagattagaaggttgaatattttgttaatggtttaataagagatttagggttaggtacggtggtttatatttgtaattttagtaatttgggaggttgaggcgggtggattatttgaggttataagtttaagattagtttggttaatatggtgaaattttatttttattaaaaatataaaaattagtcgggtatggtgataggtatttgtaattttagttatttaggaggttgaggtataagaattttttgaatttaagaggtagaggttgtagtgagtcgagattgtattattgtattttagtttgggtaatagtaaaagattttgttttaatgatcggtagttgtaatattagaaaaatggcgagtaagagtaaagaaaaatttttttggttttagaaaattttttgaaaaaaaggtttattaagtttttaaagttatttaggtaaagtaggtatttttgttaaagaaagagtagaggaaaggaaaagggtttaggtttaagtaattggaattatttttatatgatttttgatggtagaaatgtgataaagtgtattttagataattagaagtgaaatattatgttttggaattgttagataaatattttttggtttttgttgtatatatcgaaagaattgatggcgtgagtttattggtgtagagaattattgtaagattttgtttaaagaaaatttttagtggtgtttttgtaaaagttattttttagaatttaaaaatgttgcgtatggtggaattttatgtgatttggggatttttaaatttgaagtttgtttaggaatttattttgaaatatggataagttaaggttaggaataaggaataagattatttttttgatagataatatagtgattgagaagtatttggggaagtttggtgtcgtttgtttggaagattttagttatgaaattgtcgttttagggaagtatttttaggaggttttatggttgttacgttttttttattttttagtggttcgttatgttattaaaaatatagtgggtttttttaaggagatgggtatatttggttattagggtgaacgtattagttagtttattcgttagttgaattagatttaggtgttaaattgtagtaaatttttattaatgaagtggaagtatgggtagtagaagtatgtgtttttgtttttttgggaatttttattaagtatttttagagaagattatttttagttttatttttaaaaattggaaaggaagggttaaagaaaagatagaagtttacgtttgtaattttagtattttgggaggtcgaggcgggtagattatttgagattaggagttcgagattagtttggttaatatagtgaaacgttgtttttattaaaaatataaaaattagtcgggtatggtggcgtgtatttgtagttttagttatttgggaggttgaggtaggagaattatttgaattcgggaggtagaggttgtagtgagttaagattacgttattgtattttagtttgggtaatagagtaagatttttttttaaaaaaaaaaaaaaaaaaaaaaagaaggagaagaaatagtagtttatgtttatggtaagtatttttaattatagtttagtttttaaggaaaaattttagcgttttagtttaatgtcggtaagtgagtaattttagtatttgtataaggttttttaagatttttgtattagtcggttaagtttagggatataattgaatttggagatttttggggttttgttttgaaaaagatttgaaataggaagaaaggtttaaaaataaatgtttatttgtttttgaaaaaaaaaaatttgttttaaaaaaaaaaaaaagagagatttaggggggtttagggggttttttttgttattattttagtattgtttaggtgttttatcgggagaagggggttatcgagtagggagtttttatagttttttgagatttttatgatcgtattttttgagagtgttgtaggtaatatttattttttatttatatatatataaattttgtattaaattttggggattttcgaaatttaagaattcgggtgatgggattttaatttcgatatttttttgtagcgtagagtttgggagcgtagagcgcgggggttgcggggtgggttg

SEQ ID NO: 2033 - DNA, 7823 bp, Artificial Sequence
  chemically treated genomic DNA (Homo sapiens)
aattttaaatttgtttttatttttgataagttttattaaagtttattaaatttttgtttttttatttgttaattggagataattatgatatttaattttatggagtgttgtgaggattaattaaaataatgtatttgaagtttttggtattatgtttggtatggaggtatatgattatgatttgtaaattgtaatgtttttgagatggtagtagagggagtagagttaatgggaattggattttagaaaattagtaagattgatattaaatttttttataagataatgtttttgttttgatggagttagagtaatttgtatatagatgagtcgatgagatttatattaggttattttattttaataatttttgttgttttatttatgtggtattagtatatgtaattagggaatttaacgtatttttttgcgtgtatatattgtttgtttaatttttaattttagtttattttagtttttttagaatatttaagaggggagaggagaagtatggtgatattataaaattgaaattagtaaatgtttatattttttgtataaaaattgggagaaggtggagttggtttattttttttatagcggtaagagtgatattttttttttttttttttttgttttttataaaagtagttttattgggtagagtgggaaaagtataattagaatcgattttgaatttattttattttttatttataattgtgaatttgtttattttatttagattttttttatttttattttcgttttgtatagtaaggtggtagggaagttggagggttaatttggtgagtgttaaagttatttataatttgtttattattttattattaatagttattgatttagtatttaatttgattttattttttatattatatttttgattttttttagtaattttaggtgggatataatatttttatttttatagatagggagttttggggttagagaagttaggtaatttatataattttgtgttattagaaattgatatattagaattagaagttatttttttgaaagtttttaatttgggattttttttttagtatgatgtagtaaaaaattagatatagggtttattattagggtaattgggtggttgtttgagaaaggagataggaatttgtgggggtttttgaatttggaaaattttttaggggttttattttagtatttggtttgttttttattttatttcgaatttttttatgtttttgtttttgagggattgataaggttagggttagtgtagggttaagaaattgtagatttgtttatttagttttgattttaaaaaagagaaataaattggatatagaagcgtttttttttagatgtttttttttatttatgaaatatagaaggaagatagaggtttaaggtagaagatttaattaagaaaaaagtgcgtatttgggtagagagttttttatgatagatatttttggataaacgagttatagttggtagtatatggtaaatagagtagaggttttttaagtgttatttgtagatttttgggagtggttttcgagatttttttagagtatttgtaaggttaaattatttttataataatattaatatagttttgtttttttattttgttgatatttgtattaatggtattaaagtaaaggtgggtgaaattgttggggttttagtataaagtaaggaagtggtgttaaattatattagtagttgtatattttattattatgtatttataataaaatgttagtttgatttaagaatgtttttgatgaagtagtaaaaattattaattttattaaattttagattttaagtatacgtttttttaatattttttgtgatgaaatggaaaaggtatatattaaaggatgatggttatttcgaggaaaagtatttgcgtgattgtttgagttgttaagacgagtttgttattttaaggaaaataattggtagtatttgttgttaataataaaattgagtttttaagtaaaaattagaatttgagtttgattgttttttagtatttaaaatatttatatgatgagattaatattgatattatttgatatgaatttttgaatattgtatgatgaaatgttgtatttattgtatgatgaagtaggtagtatttagaaaatttgtatattttagtggattaatgttttttaaatgattagtgtttgatattgtaaaataatttgtgggtaatagttttatttaaaatatatataataaaagatttgaatgtaatagtatatataaagtatatgtttatataaagtatatataaagtatatgttgataaggttttagattttataatgtaattagttttttagaaattattatttattgagttttgatgtggtattaaagaagaataattatttgaaaaggttattataatattttttttttttaattatataaatgtgtgagtttatattttttttaaatatgttaattaaaataatattttgtagtagattaaatgtagaaatagatatgagaatttagttgtttttttttaaattagatattaaagagatttttaaaatgttattttttttattacgttttttatgttggaagatatatttgttttttttaaaatatgtttaatatggagtgggtttattattgttattttgaaggaataaatatatattttaatttttttttagatttaagttttaatatagtaaataaaaattttatttagaatagtaatatataaatattttttgggtttgttaataatttttaagggaataatggtattttgagaataaaaggtttaaaaattgttgtggaagtcgtaaggtaaggttttgaaaaggaggaggagaataaattttgttttgtatagtaggtatttaataattgaatatgataatgataaggatatgtaaaattagtgtgattaatattatgaggtaggaagtgaaaagtgttaaataagtggtttagatgtgtattgtttaatacggtagttattagttatatgtggtttggaatgtggttagttttaattgatatgttttgtaagtgttaaatatatattagattttagagattgagtatgaaataaggaatgtaaagtattttattgataattttttatattgattatatgttaaaatgttaagatttttgtatatattgggttatttataatattaaaattaattttatttgtgttttttttttttttaatatggttatgagaaaatttataattatatatgtggtttatattttattttttttggagagcgttggtttggataggaagtatgaagaatttggagtagggaaatattgttgtgggtttaggttatcgggaagtttttattgagaattataggattttattaagtaggtaggtttagggaggaatatttagttgaagaaagtttcggtagtgaaatatgaggttaatttgggtagttgaggtgattgtttgggttatattatgggtttttataggggagaaaagttttttggataggttgggattaaattgtatagaatttaaattgttaagaatttggattttttttttataggtagtgatagtttttttagaagaaaattagattttgtttagtagtttatggaatagtttgaaattggtatttttttatgtagggttagagtagtataagtttttggaaattgtttgtttaataagtagtggggattaggtttatttaattaggaaatttatagtgatatggaaagtgtgattttggattgattgatttatttgggggtgggtggtaagtttaagtatatgataatgttatttgggagagaagaatttagagggtgtatttgtgtgaaattcgttagggaagagggaggtaggttttttattttggtatattgttttaagtatgtgtataattaaattgagtgatattttttattttttttttagtttgtttgtttgtttttatttttgtttttgttttattatttttatttttttaaatatttttattgattttttaatatacggtgggattttattgtgttgtttgggttggttttaaatttttgggtttaaggagtttttttattttagttttttaaagtgttaggattataggtgtgagttatacgtttggatttttttttattttattgaatttttattgtgaattaaggggttaagagttaattataaggagatgaaatgaaaagattattgaagtgggaagggaaatatttgggttattatcgggtttcgtggttaatttattgagtttttttggttattttattgggtttttttagatatgaaagaggatttagtattagatgggattaagattttttttaattttgtgattttagaataggttgatgttataaagggagaagaacgtatcgtagtaattaggggtaaggttatttaaggagagtaggaggaggttaggttaggaagggtaagtattggtggtttatttaggatttggtttaattttttgggttaggttattttcgtcggagtgagcggatttcgttggaattggagtttagtaaggtttatgagtttggtgttttgattttggttatttattttttttattttaggggtggtttattaggttgagtggagttttatattagggagagaggaagttgaagaattgggttttaggtaagtaattttgtagaggattttagattgtttaaggaaattattgaagaaaatgtatgtttcgtttttttttttttttttggtattgttgagttatttgtagttgcgagagtcgttgggagggataagagggaagaggacgttcggtgaaggggttttagtttggtagtttttgcgtgttagtatttttagaatagagtgggtgggaattgatttaagtaaagttttagagattcgaatattgacgtataggaaagttttaagtgggaggagaaatgtaaattttttattgatgatggcgttagcggtttttttttagggattgtgaggggcgtttttgattttggatttgagtattgtttgggatttgtgttgagagagcgttaggtaagtggttagattatattttttggttgttttttgtaaggaggatatgtttattatgtaggatattttgaagttttgtttttttttggcgttttgataattgttttattttaatttttttgaggaggtttattatagaaggaagcgttcgattttacgatttatagatgcgttttggtacgggtttttcgcggaaatcgtttcgtaggttcgcgttacggtgttcgggcgaatttttttgcgggggttaggggagttgcggcggttgcggaggtgtgttttcgcggaggttgaaagtgagtttttttttatttttttagttagtttttttagagttgtgatgtttgattttagattagcgtatttggattttagaaaaaagtttgtagttacggtagtcggtgattgtggttttgatgggcgcgagtgatattttagggtaggttatttttttttgtaagttataggttatagagttaaagcggtattattagtttatagacggtgggataaaatgtttttttagtgggattttttaggaaatgtacgtaaaaaggatagataggtattgagtttttagaagtaacgttatagtttttatgagaaagaagtagtttttagagagtgaaagtaaagaaatttgttgaaggatgtttaaaggcgtttttagaggttgtaatagaaaatgttttaggattatgtatttttttttttttttttttttagttttgaatttagtttttcgaaagatttagattttagtagtgatttttttcggtgtttatttttattttttttaattttttttttatttttatttgatatataattgtaaatatttatggaatatatagtgatattttaataaatatgaataatgtgttatgattaaaggatatttagtatatttattattttaaatatttattattattttgtgttgtgaatatttaaaatttttttagttttttgaaaatatatattaagttattgttaattatatttattttagtgttatagtattagaatttattttttttatttatttgtaagttttagttagaaaatagattttttatttaaattatagcgggggtttaataatagtatgatgaaaaattgtaatgttatttttaatttatgttttttgttgttattaattaaaataaattgatagataggataatgttgatagtagtatgagaataaatgttttaattttgtgtggaatatatatatattcgatggaatatatatatattcgatatttggaaaaataaatggtttagatttaggaaattttaggttgttttttagaagttttatatattaggtaggcgttatttcgtttatttgatttttaagttttttttttttaaagttgatatattatttatatttatttattatatttatagtaatgttaggagtgttatttattttttatttaataagtattgattgagtatttataatatgtttagaattgtaaagtgtaaaggtttttataaatataaaatgatatgtaaataaaatattatttttttttttatttgttttttttttagtaaaatattggtaatacgtttttttataaattttaagttatttattaggagtttagggaaaaggtgtttaaaatgattttatttaaaatttaaagaatatgtatatgaaatatatgaaattattttggtgttttataggtaaaaggaaattttagtttatttatgagatatgttgaaatgttatggtgattaattatgtaaaagggggtttggtgtttttatttgatttagaattgttgagaaaataattaaaaatttgattttggaaaatataaaatgttgtaattttaaggaggtagcgttatattaatttttttgagttaggaaatatgtttatagtttttaaattggttagagtggggttataagggggaaatgcgtattttttttttatgataggttgttaaataggtattaagtgtggttttttattttttaagtaatttgagggtttaattattattagatgttttttagagataaaaagattatattttttaagagttttgtttatttataatggatttttatagagagaaatgaaatatatttattggtttagaaatatttttaatttaaaaaattggagtttacgaaaatgtatatataaaattttttatgaagttaagataaaattggattagaagttaagaatataaagttgattttagaagttagataaatttgaaataaagaaaaaagaaatttggtaattttatataaaagaagttttttggggggttgttttttatatataaagttttagagggttttaggaggtatagtaaatgttaaatacgtttgtttttaagttgttttaagtttaaatgttgaggggataagagatagggaaagagtttgttgataatagaaatttatatagatagttgtgggtaggatgtggggtgtttggtagagtgggagtgaaaattttttggagtaggtagaataggagtttattttagagtaaggaaggttgtagtttaggggtatagaaagaaggttgttttttttattagggttgaattatgaaaaaaaattttagtgaaatttttgtatttttggatatattggaatttagttataatattgattaattttaaggaaagaagaaaatatgtattagggttatgaataatattttaaaattttaattttatatttttttttatagt

SEQ ID NO: 2034 - DNA, 7823 bp, Artificial Sequence
  chemically treated genomic DNA (Homo sapiens)
gttataaaagaaggtgtagaattagagttttaaaatattgtttatagttttagtatatatttttttttttttttagaattagttaatgttatgattgaattttaatatatttaaggatataaaaattttattaaggtttttttttataatttaattttaatgaagggagtagttttttttttgtgtttttaaattatagttttttttgttttaaaatgaatttttgttttatttgttttaaaaagtttttatttttattttgttaaatattttatattttgtttatagttgtttatgtgaatttttattattaataagttttttttttattttttgtttttttaatatttagatttggagtaatttgaaggtaaacgtatttgatatttattatattttttaaaattttttaagattttatatgtgaggaataattttttaagaagttttttttatatgaaattgttaaattttttttttttttattttagatttgtttggtttttagagttagttttatgtttttgatttttagtttaattttgttttagttttatgaagaattttatgtatgtattttcgtaggttttagttttttaaattaaaaatatttttgaattagtgaatgtgttttatttttttttgtgaggatttattatagatgggtaaagtttttaaaggatgtagtttttttgtttttgagaaatatttgatagtggttaaatttttaagttatttaaggagtaagaaattatatttgatatttatttggtagtttgttataaaagaaaagtacgtattttttttttgtaattttattttggttaatttagaagttgtagatatattttttaatttaggaaaattagtatgacgttgtttttttgaaattatagtattttatgttttttaaagttaaatttttggttgtttttttagtaattttaagttaagtaaaaatattaaatttttttttatatgattaattattataatattttaatatattttatagataggttaaggtttttttttgtttatagaatattagggtaattttatatattttatatatatattttttgggttttaagtagaattattttgagtattttttttttgagtttttggtaaatgatttaaaatttataaaaaaacgtgttgttaatgttttgttaaagagaaagtaagtgggaaaagaagtaatgttttatttgtatattattttatatttatgaaaatttttatattttataattttaggtatattgtaaatgtttaattaatgtttgttaaatgaagaatgagtggtatttttgatattgttatgaatatggtaggtggatataagtagtatgttaattttaaaaaggaaaaatttgaagattaaataggcgaaatgacgtttgtttaatgtgtgaggtttttaagggataatttgaggttttttgagtttgaattatttgtttttttagatatcggatgtatatatattttatcggatgtgtatatattttatataaaattggaatatttgtttttatgttattattaatattgttttatttattaatttattttagttaatgataatagagaatatgagttgaaaatagtattatagttttttattatattattgttaaattttcgttatgatttggatgaaaaatttattttttaattaaaatttataggtagatgggaggaataagttttagtgttgtaatattaggatgaatatggttaataataatttagtgtatatttttaaaaagttaagaggattttgaatgtttataatataaagtaatgataaatgtttgaggtgatggatatgttgaatattttttgattataatatattgtttatatttattgaaatattattgtatattttataaatatttataattgtgtgttaaatgaaaataaaaggaaaattaaaaaaaataaaaataaatatcgaaaaaaattattattaagatttgagtttttcggagagttgaatttaaagttgaaaaaaggaagaagaaggaatatatagttttaggatattttttattgtagtttttgggaacgtttttagatattttttagtaggtttttttgtttttattttttaggggttattttttttttatgaaaattgtgacgttgtttttgaaaatttagtgtttgtttgttttttttgcgtgtattttttagaagattttattaaaggggtattttgttttatcgtttgtgagttggtggtgtcgttttggttttgtggtttgtagtttgtaaaaggagatgatttgttttaaaatgttattcgcgtttattaaagttatagttatcggttgtcgtagttgtaagtttttttttgaaatttaggtacgttaatttaaagttagatattatagttttagagaagttggttaagaaagtgaagaggggtttatttttagttttcgcgaggatatattttcgtagtcgtcgtagtttttttggttttcgtagggagattcgttcgggtatcgtggcgcgggtttgcggagcggttttcgcggagaattcgtgttagggcgtatttgtgggtcgtggagtcgggcgtttttttttataataagtttttttaggaaggttaaaatgaagtaattgttaaaacgttaagggaaagtaaagttttagagtattttgtataataagtatgttttttttataagaggtagttagaaggtgtggtttggttatttatttagcgtttttttagtataggttttaggtagtgtttaagtttaaagttagaagcgttttttatagtttttaggagaaagtcgttgacgttattattagtaggggatttgtatttttttttttatttgaggtttttttgtgcgttagtgttcgagtttttgggattttatttgggttagtttttatttattttattttagaaatgttaatacgtagaaattgttaggttggagtttttttatcgggcgttttttttttttttattttttttagcggttttcgtaattgtaggtggtttagtagtgttaggaaaaaggggaggggcggggtatatattttttttagtggtttttttagataatttgagattttttgtagagttatttatttggagtttagttttttagttttttttttttttagtataaggttttatttagtttggtgaattatttttgggatggaagggatgggtagttaggattaaaatattaaatttatagattttattgggttttaattttagcggggttcgtttatttcgacgagggtgatttgatttagagggttgggttaagttttgggtaggttattagtgtttgttttttttgatttagtttttttttattttttttgagtagttttgtttttggttgttacggtgcgtttttttttttttgtgatattagtttgttttagaattatagagttggaggaagttttggttttatttaatgttaaatttttttttatatttgaagagatttagtgaggtgattaagaggatttaataagttagttacggagttcgataatagtttaggtgtttttttttttattttagtggtttttttattttatttttttgtagttagtttttaattttttgatttatagtaggggtttaataaaataaagagaagtttaggcgtgtggtttatatttgtaattttagtattttgggaggttgaagtggaaggattttttgagtttaggagtttgagattagtttaggtaatatagtaaaattttatcgtatattaaaaaattaataaaaatgtttaagaaagtaaaaatagtaaaataaagataaaaataaagatagatagatagattgaaagaaaggtagaaagtgttatttaatttggttatatatatgtttagagtaatatattaaggtgaaaggtttgttttttttttttttgacgggttttatataggtatattttttggattttttttttttaggtgatattattatgtgtttaaatttattatttatttttaaataggttaattaatttaaagttatattttttatattattgtaaattttttggttaggtaggtttggtttttattgtttgttgagtaggtagtttttaggagtttatgttgttttgattttatataagaaagtgttaattttaggttattttataagttattaagtaaagtttgatttttttttggagaagttgttattgtttataggaaaaaaatttaaatttttggtagtttaagttttgtatagtttggttttaatttatttaggaaattttttttttttataagagtttatgatgtgatttaagtagttattttagttgtttagattaattttatattttattatcgaggttttttttaattggatatttttttttgagtttatttatttagtgaaattttatagtttttagtgaagatttttcgatgatttgaatttatagtaatgtttttttgttttaaattttttatattttttgtttaaattagcgttttttaagagaaataaaatgtaagttatatatgtaattgtaaatttttttatagttatattaaaaaggaaaaaagtataggtgaaattaattttaatattgtaaataatttaatatatataagaattttaatattttggtatataattaatataaaaaattattaataagatattttgtattttttattttatatttaatttttgaagtttggtgtatatttagtatttatagggtatgttagttaggattagttatattttaagttatatatggttagtggttgtcgtgttggatagtgtatatttagattatttatttagtattttttattttttgttttatagtgttagttatattggttttatatgtttttattattattatatttaattgttgagtgtttgttgtataaaatagagtttgtttttttttttttttttagggttttattttgcggtttttatagtagtttttaaattttttgtttttaagatattattatttttttaaaaattgttgataaatttaaggaatgtttgtgtattattgttttggatgaaatttttatttattgtgttaaaatttaaatttgagaaaaaattaaaatatgtatttatttttttaaaatgataataataaatttattttatgttaaatatgttttaagaaaaataaatatattttttaatatgaaaaacgtaatgagaagagtggtattttaaaaatttttttaatgtttggtttgagagaagatagttggatttttatatttgtttttgtatttaatttgttgtaaagtattattttggttgatatatttgaagaaagtatggatttatatatttatgtagttggaaaaggggagtattataatgatttttttaaataattatttttttttgatattatattaaaatttaatgagtggtagtttttgaagggttagttgtattgtgaaatttgaaattttattaatatatattttatgtatattttatgtaaatatatattttatgtatattgttatatttaaattttttgttgtatatattttgaatgaaattattatttataaattattttgtaatgttagatattggttatttaaaaaatattggtttattgaagtatgtagattttttaaatgttgtttattttattatataatgaatataatattttattatatagtgtttagaaatttatgttaggtaatattaatgttgattttattatgtaagtattttaaatattgggaagtagttaagtttaaattttaatttttgtttgaaagtttagttttattattggtagtagatattattagttgttttttttaaagtgataggttcgttttggtaatttaaataattacgtaagtgttttttttcgagatgattattattttttaatatgtgttttttttattttattataaagaatattaaaaagacgtgtatttaaggtttgagatttaataaaattaataatttttattgttttattaaaaatatttttaagttaaattggtattttattgtaagtgtatggtggtgaaatatataattgttagtataatttggtattatttttttgttttgtgttaaggttttaatagttttatttatttttgttttggtattattggtgtaaatgttagtagggtgaaaagataaaattgtattagtattattataaaaatagtttaattttgtagatgttttaaaaagatttcggggattatttttagggatttgtaggtaatatttagagaatttttgttttatttgttatatgttgttaattgtaattcgtttatttagagatgtttattatgagggattttttgtttaaatacgtattttttttttggttaaattttttgttttgaatttttgttttttttttgtattttatgagtggaggaagatatttaagaaagggcgtttttatgtttaatttgttttttttttttagaattaaaattaaataagtaggtttgtagttttttgattttatattggttttggttttgttagttttttagagataaagatataaaaaaattcgaagtaaaatgaagaataaattaaatgttaaaatgaaatttttggaaggttttttaaatttaaaggtttttatagatttttgtttttttttttaaatagttatttagttgttttggtgataagttttatatttaattttttgttgtattatgttaagaagaaaattttagattaaagatttttagaaaagtagtttttagttttggtgtgttaatttttagtggtataaagttatataagttatttaatttttttaattttaaaattttttgtttataaaagtggggatattatgttttatttgaaattgttgggaaaagttaaagatataatgtaagaaatgggattaggttaaatgttgaattaatagttgttaataatagaataataaataagttatgggtaattttggtatttattaggttaattttttagtttttttgttattttgttgtatagagcggaaatggagatgaagagagtttgggtgggataggtaggtttatagttgtaaatagaagatagggtggatttaaaatcggttttgattgtgttttttttattttgtttagtggagttgtttttgtgggaaatagagagaggaagagagaggatattatttttgtcgttgtaagggaggtaaattagttttatttttttttaatttttgtataaagaatataaatatttgttagttttagttttgtgatattattatattttttttttttttttttaagtgttttgaggaaattggggtgagttggagttggaggttggatagataatatgtatacgtagaaagatgcgttgagttttttggttgtatatgttagtattatatgagtgggatagtaaggattattgggataagatggtttggtgtgaattttatcgatttatttgtgtgtaggttgttttagttttattagaataggaatattgttttgtaaaagggtttaatattaattttgttaattttttgaagtttagtttttattgattttgttttttttattgttattttagaagtattgtaatttataaattatagttatatatttttatgttagatatagtgttaagaattttaaatgtattgttttagttaatttttatagtattttataggattaaatattatgattatttttaattggtagataaggggatagaggtttagtgagttttagtgaggtttattagaggtaaggatagatttgggatt

SEQ ID NO: 2035 - DNA, 11726 bp, Artificial Sequence
  chemically treated genomic DNA (Homo sapiens)
gttaaattttttaaaaattttgtatttgaataaataggtgtagacgtatattttttaatttagatttttggtattttaagtataattttttagtagtatagatatcgtttgaagtttgttaaaaatgtaggttttcggtcgggtacggttgtacgtttgtaattttagtattttgggaggtcgaggcgggtggattacgaggttaggagatcgaggttattttggttaatattgtgaaatttcgtttttattaaaaatataaaaaattagttgggcgtggtagcgggcgtttgtagttttagttattcgtaaggttgaggtaggagaatggcgtgaattcgggaggcggagtttgtagtgtgtagagatcgcgttattgtattttagtttgggcgatagagtgagatttcgttttaaaaaaaaaaaaaaaaaaaaaaaaaaatttaggtttttaggttttattttagatttatttaatttagtaatattttaagattttaggtgatttttttagcgttttatggtttgaaaagtatattagataaaaaaattataatatgtttaattgaaatatttttttagaggtttttaaaaatttagttttggtcgggcgcggtggtttacgtttgtaattttagtattttgggaggtcgaggcgggtggattatgaggttaggagatcgagattattttggttaataaggtgaaatttcgtttttattaaaaatataaaaaattagtcgggtacgtggcgggcgtttgtagttttagttattcgggaggttgaggtaggagaatggcgtgaatttaggaagcggatttgtagtgagtcgagattgcgttattgtagttcgtagttcggtttgggcgatagagcgagatttcgttttaaaaaaaaaaaaaaaaaaaaaaaaatttagttatttttatttgatttagtattaaataagttagtattgtaaatttattttatagatgttaaaagtagttaagatgttatgggagagttaagagtttagcgttatatttttttaaagttatgttagtttttttttttttttatttgtttttatttttttttttttttttttaattgagatattgttttattttgttatttaggttggagtgtagtggtagattatggtttattgtattttttatttttttgttttaagttatttttttattttagttttttgaatagttgggattatagatgtatgttattatgtttagttaatttttgtatttttttgtagaggttgagttttgttatgtgttgtaggttagttttaaatttttgggtttaagttatttatttattttagaattttaaagtatggtgattaaaggtatacgttattacgtcggtttgtttttgtttgttgtttttattattttttaaatttaatttaatttaatttttttgagatagagttttttttttgttttttaggttggagtgtagtggtataattttgagttattgtagtttttgttttagttttttgagtagttgggattataggtggtcgttattatatttagataattttagtatttttagtagagatggggttttattaggttgattaggttgattttgaatttttaattttaggtgatttgttcgtttcggttttttaaagtgttgggattataggtatgagttattgtgtttggtttgttgttttattttgcggtttaggttggagggtagtggggtaattatagttgttgtattattttagttttttggttattttttttatgttttaagatggagtttaataaatgttttattggagagtaagttatgtgtatatcgtttatttttatttataggtttatttgtttagtttagagtaaattaagaatttgttagtagttttttaaaatatataatttgtatattgtattaagatagtattttttttagtatgtagttgatatttataagagaaaaatattatagaaaaatattattagataattatattagaatgagatttttgggttttaattataattttttttttttttttgttttaagagataagggggtcggacgcgatggtttacgtttgaaattttaatattttgggaggttaaggtaggcgaattatttgaggtcgggagtttaagattagtttggttaatatggcgaaatttttatttttattagaaatagaagaaaaaaaaataattgggcgtggtggtggcgtttgtaattttagttattcgggaggttgagttaggaggtagatgttgatatgagtcgagattatgttattgtattttagtttgggtaataagagtgaaattttgttttaaaaaaaggaaaaaaaagagagagagataagggttttgttttgttgtttaggttggagtgtagtcgcgagattttagtttattgaagtttttagtttttgggttttaagtgattttttttttttagttttttgagtagttgggattataggcgaatgtattacgtttagttaattaaaaagaattttttttttttaatagagttttattatgttgtttaggttggttttaaatatttgggttttattgatttttttgttttggttttttaaagtgttgggattataggtgtgagtttttgtgttggtttataattttttttaatgggtgaataaaaaatttttatttatttatttatttattttgagataaagtttcgttttgcggtttaggttggagtgtagtggtttgatttcggtttattgttagtttcgtttttcgggtttacgttatttttttgttttagtttttagagtagttgggattataggcgttcgttattacgttcggttattttttttgtattttttagtagagacggggtttcgtcgtgttagttaggatggttttaattttttgattttatgatttgtttgtttaggttttttaaaagtgttgggattataggtatgagttattacgttaggttaaaaaattattttaatttgtttataattattttattaatgaaggtattattttagtaataattttggtagtagaattaaattattgagattataatttgtattattttattttgaaagtataatttatatatattttttggttttttattttaagtgtggtggtttagaagtttgatttattttttagattgtttaagttaaatatatgttatttagggtattgtggattagaataaatatttgtgttttttggttttgtttttagttgtgttatttaatttttttttttgttttattttattttgttaaaagtagatagtagtagtaatttatgataaggttgtgaggattaaaagtttagattggtgtttgttgtatattaagtgtttaataaatggtaggtttgatgattattatttgtgagtagttatgaagtgggaaagtaaattaaatgatttatgtttttattggtttttgggtttgattttttttttgtgtaggatgttttttttgtataaaaagtagtatttttttgtattgtttgtaatttgagttatgattagtagtataatttattattcgtgtatttggatatattagatgatggaggtaatagtgtagtggttaagagtatgggttttggagttaaatagatataggtttggattttgtttttataatttattattgggtgtgaatttgtgtaaggtaatttttttatttgtaaaaaggggattttagttgattttatatatagtttaaaaattaaatgaaataagtatgtgaaatgtttgatgtaatgttttacgtataaatatatatatattttttagatagggtttcgttttgtcgtttaaggaatgtagtgttacgattagggtttattgtagttttaattttttaggtttaagtgatttttttattttaattttttaagtagttgggattataagtatgcgttattatgtttggttaatttttattttttatttttttttttgagacggagttttgtttcgtagttaggttggagtgtagtggcgttatttcggtttatcgtaattttcgtttttcgaggttaagggatttttttgttttagtttttcgagtggttgggattatagatgcgcgttcggttaattttgtgtttttagtagagacggggttttattatgttggttaggatgttttcggttttttgatttcgttattcgttggttttagttttttaaagtgttaggattataggtgtgggttatcgcgttcggttttttaaaaaatttttcgtagagatagggtttagttatgttgattaggttggtttttaatttttgggtttaggtgatttttttattttggttttttaaagtgttgtaattataggcgtgagttatcgtatttggtatgtatatatgtatatgtatatatatatatttattttttttttttaggtttataaatattaatttttttttttttaaaggtaaatcgaggattagatgttgatttaatcgtatttgaattattgatgttattttttttatattaaatttaaggtttttttcggataagtgtaattatgggtataatgttagattttttgagggttgtgtattatttagtaattaaaataaataattatagtaagatatgtaatttttattaaatacgttatcgttttttttttttaattatgttaattgtggtgttaggattttgtttatggaaattaaaatgtcgattttcgggagtcgggggcgtgggggggcggggggggcggggggggatttaattcgattatgtgacgtattttattttattttttttcgtagttgtattagttaagttagagtcgtttttttaggaatttattaatgaacggattcgtttttagtttgattggtatgttggttgattaataatattttatgaggtaaggcgcggcggggtatttttcgtcggcgcgttttgattggacggagcgtggcgggttgtggtaggtcgtggtttgaggtcggtatagttgcgcgtttgcgggaataggtgtagcgggtttttggcgggggattttgagggaggagttggggacggcgattttaggagaggtaggtcgttttcggagagttttgcggtgttaggagagcggttgggttcgtagattggggggaaagtttcgtagtcgtagtgggttttaggattagtttcgcgtggtttggagaagtttagtttgggttggagcgggagttggatagtgtggttttgcgttcgttttcgggagcgttgcgagtgtcgcggtttcgggtggatttgttgagtattagatattttacggttgttaatttggggttttagtttttttggttttaattttttaggggcgggtgggggtacgggaggaaggatgggttagttgggtgtaattttgttgtaagttagttattttttgattttttaaaattaattaaatagttgatgtcggtttaggcgtatcgagatcgttattttaagttgttttgtaaaatagtttgtatttttcggtgtgttttgaagtatgtgagttaatttcgaatttggtgttaaaggattagtatatttgattacgaaatacgtatttagtagttattgtattagatgttgaggatgtgttgtaatagtttagggttaggcgcggaggtttacgtttgtaattttagcgttttgggaggtcgaggcgggcggattatttgaggttaggggttcgagattagtttggttaatatggtgaaatttcgtttttattaaaaatataaaaattagtcgagcgtggcgcgcgcgtttgtatttttagttatttcggaggttgaggtatgagaatcgtttgaattcggtaggcggaggttgtagtgagttgagattatattattgtattttagtttgggtgatagagggagatttcgttttaaaaaaaaaaaaaaaaaaagagtttagaatagtcgttgttgttgggatggaattgatagtttgatgggggaggcgtatattaaataatttatgaagcgcgtatggaaattatgaagggaaatatttgaggttgtgagatagtaaaagagggggagttttattaagaaggggaaggcggtcgggcgcggtggtttacgtttgtaattttagtatttggggaggtcgaggtgggtagattacgaggttaggagattgagattattttggttaatacggtgaaattttatttttattaaatatataaaaatagtcgggcgtggtgattggcgttcgtagttttagtagttttagttattcgggaggttgaggtaggagaatggcgtgaattcgggaggcggagtttgtagtgagttgagatcgcgttattgtattttagtttgcgtaatagagcgagatttcgttttaaaaaaaaaaaaaaaaaaaaaagaagaaggggaaggttgttttaaataagtgttttggtcgggcgcggtagtttatttttgtaattttagtattttgggaggtcgaggcgggtagatcgtttgaggttaggaggtcgagattagtttgattaatatggagaaatttcgtttttattaaaaatataaaattagttaggtgtggtggtatatgtttgtatttttagttatttaggaggttgaggtaggagaatcgtttgaagtcgggaggtggagattgcggtgagtcgaggttgcgtattattgtattttagtttgggttataagagcgaaatatcgttttaaaaaaaagaaaaagtgtttttacgtttgttgttgtttgagttagggttttattttgttatttaggttggaatgttttggtgtgattatagtttattgtagttttaaatttatgtgtttaagcgattttttggatttagtttttcgagtagttgggtttgtaggtgtatattattatatttggttaattaaaaaaaaaattgattttttaggtttaggtgtttttatgttgtttaggttggttttgaatttttggttttaagtaatttttttgttttagttttttaaagtgatagagcgagatttgtgtgtaaagtttgggtgatagagcgagatttgttttaaaaaaaaagttgaaataggtttcgttttgttatttaggttggagtgtaatggtatgatttcggttcgttgtagttatcgttttttaggtttaagtaatttttttgatttagttttttaagtagttgggattataggcgttcgttattatgtttagttaatttttttttttttttttttttttttgagacggagtttcgttttgtcgtttaggttggagtgtagtggcgcgatttcggtttattgtaagtttcgtttttcgggtttacgttatttttttgttttagtttttcgagtagttagttgggattataggcgttcgttattacgttcggttaattttttgtatttttagtagagacggggttttatcgtgttagttaggatggtttcgattttttgatttcgtgattcgttcgtttcggttttttaaagtgttgggattataggcgtgagttatcgcgttcggtttaatttttgtatttttagtagagatggggttttattatgttggttaggttgttttcgaatttttgattttaggtgatttattcgtttcggttttttaaagtgttgggattataggcgtgagttattgtattcggttgaaaattttttgttgtttaggttggagtgtagttgattttggtttattgtaatttttgttttttaggtttaagcgatttttttgttttagttttttaagtagttgggattataggtgcgtgttattatatttcgttaattttttgttgtgttgtatttttagtagagatagggttttatcgtgttagttaggatggttttgattttttgattttgtgatttattcgtttcgattttttaaagtattgggattataggcgtgagttattttattcggttttaaaaattttttttaaatataaaaaaattagtcgggtttggtggtatatgtttgtagttttagttatttcggaggttgaggtgggaggaatatttgagtttggaaggttaagtgattgtattattgtttgcgttttagtttgggtgatagagagggagattttgttttaaaaaaaaaaaaaaaaaaaaaaaatttttgtggagtggttggagttatagcgtgatttaaggtatttaagatttttatagtttttgttagtaagtgaaatttgaggttttgtttttgtgttatttttgtattttatatagttttttagtgaataaattaatgagtttatgttgaataaatatattgaatttatatcgaataaatataaatttagattgaataaataaatgggggtaaataaatgaatgtggggatatagtttttaatagttttagtttttatagatttatagttaatatatttagtttttttatataatattgtagttaattttgtatatgatagtttttttaggaaggatataggttgttatttattttgatttttggtatatagtatgtatttattatggtgaattagtaagtaaaaatgggaaatttatgtgttttttggaaagtagttggagttaggattttttgtttattttgtatatttttattgtattttttttataaggagaaaattttggttgggtatggtggtttatgttattttaatattttgggagattgaggttaggagttcgagattagcgtgggtagtatggtaatattttatttataataaaaatagaaattagttgggcgcggtggtttatgtttgtaattttagtattttgggaggttgaggttggtagattatttgaggttaggagttcgagattaggttgaggaatatggtgaaattttgtttttattaaaaatataaatattagttgggtgtggtggtatttatttgtaatttaggttatttaggaggttgaggtaggagaattgtaggaatttgggaggtggaagttgtagtgagttgagattgcgttatagcgttttagtttgggcgatagagtgagattttgttttaaaaaagaaaaaaaaagaaattaattgggtatgttggtgtgtaattgtagttttagttatttgggaggttgaggtaggaggattatttgagtttcggagtttaaggttgtttaagtgattgttttattgtattttagtttggatagaattagaaaaaaagaagaaaatttttagttaaataatttaaaagtaatattatttattttgtttttttaaggtttttttttttttttttttttagacggagttttttttagttatttaggttggagtgtagtggcgtaatttcggtttattgtaattattattttttaggtttaagcgatttttttattttagttttttgagtagttgggattataggtattcgttattattttcggttaatttttgtattttagtagagatggggttttattatattggttaggttggtttttaatttttgattttaggtgatttatttattttggttttttaaagtgttgggattataggtgtgagttatcgtacgtggcgtaacgttttttattttatagattgtttttaaatatagtatagtttttgatttttataatattttagttgagtaggtagggtagatattgtttttttatagaaaaggaattgaatttaggtaaaagtgaattaaggttacggttgggtttggaattttagagattttttgataataatgataatattgtgaataagatggtttttatttttttagatatagtagtttgtggtattatagtattatgttagtgattagtatttttattaaagtttgttatttttttttagtttattttttagggaaatcgtaatatttgtgaaagagttgtttttgtttttgtttgtttgttgatataaggtttttgtcgtttaggttggagtgtagtggtatgattttggtttattgtaagtttcgttttttgggtttacgttatttttttgttttagtttttcgagtaattgggattataggcgtttgttattatgttcggattattttttgtatttttagtagagacggggttttattatgttagttaagatagttttgattttttgatttcgtgattcgtttgtttcggttttttaaagtgttgggattataggcgtgagttatcgcgttcggttatttttgttttttttgagacggagttttgttttgttatttaggttggagtgtagtggcgcgatttcggttgattgtaatttttattttttgggttcgtgttatttttttgttttagttttgtgagtagttgggattataggcgtttgttattacgttcggttaattttttgtattttttttttagtagagatagagttttattatgttagttaggatgttttggattttttgatttcgtgatttatttatttggttaatttttttattatttgtattgataagattttgttatgttgtttagggtggttttaaattttagggtttaagtaattttgttatttcggttttttaaagtgttgggattataggcgtgagttatcgcgtttaatttgtgaaagagttttgaagttataaagttttttttttttttattagtttttttgtatttttatttttagtaagttgtgtttttaaagtggggttatagtatttttattttttggtaatttaatggttggaaggtagtcgtttgttgttagggtttttgggggatgtaggttatatagaggtaggtatatttttgttatatataggtggttttttgtatagataggtttatttttaggattattgttgttgatagtcgttttattatgatattaggttaaatttagagattttgattttggggttagtggaattttgtagttttaggcgtgtatattaatatagagttgaagggatttttagagataattttatatggattttttttttttttggtgaagtgatttttttaggatttgaagttagaatttaaatttcggttttttgagttttttttttttttttttagttggattaaattgagggtttttttttttttttttttttttttttttttttttttttttttgtttttttgagacggagtttttttttgtcgttaggttggagtgtagtggtgtggttttggtttattgtaatttttattttttgggtttaagcgatttttttgttttagtttcgtaagtagttgggattataggtacgtattattatgtttagttattttttgtatttttagtagagatgggattttattatgttggttaggttggttttgaatttttgattttgtgatttgtttattttgtttttttaaagtgttgggattataggcgtgagttatcgtgtttggttgtttttttttttttttaatttttagtttcgggtttgatatagagtagatgttcgatatatatttgtttaatgaataaatatttagtagtagtgtgtttggtgtgttggggtgttgaattttttgaggttggtatgggaaggaagaatagatggggttgttgtttgttggtgatgatgattttagttttggatattataatatagaggttttaggattaaatagtttatttgagtcgtgttttgatttggtttgagaagttagaagttttgtgtaatgtgtattttgatttttaatttttttaatttttttttatttttttttttttgattagt

SEQ ID NO: 2036 - DNA, 11726 bp, Artificial Sequence
  chemically treated genomic DNA (Homo sapiens)
attaattaaagaaaaaaaaatgaaggaaaattaagggaattgaaagttaaagtatatattatataagatttttggttttttaagttaagttaaagtacgatttaggtgagttgtttgattttaaaatttttatgttgtaatgtttaaggttaaaattattattattagtagatagtagttttatttgttttttttttttatgttaattttaagaggtttaatattttagtatattaagtatattgttgttggatgtttgtttattaaataaatatgtatcgagtatttgttttgtgttaggttcgagattaggaattagaaaaaaagagggatagttaggtacgatggtttacgtttgtaattttaatattttgggagggtaaggtgggtagattataaggttaggagtttaagattagtttggttaatatggtgaaattttatttttattaaaaatataaaaagtaattgggtatggtggtgcgtgtttgtaattttagttatttgcgagattgaggtaggagaatcgtttgaatttaggaggtggaggttgtagtgagttaagattatattattgtattttagtttggcgatagagagagatttcgttttaaaaaaataaaaaaagaaggaaaaaaaaaaagaaaaaaagggggagaaaaatttttagtttagtttaattggggaagagggagagaggtttaggagatcggggtttgagttttagttttaagttttgagggagttattttattaaaaaaaggaggggtttatatgagattatttttaaagatttttttagttttgtgttaatgtatacgtttagaattgtaaagttttattagttttaaagttagggtttttaggtttggtttgatgttatggtgaggcggttgttagtagtaatagttttggggatgggtttatttgtataagggattatttgtatgtagtaggaatgtatttatttttatgtagtttatattttttaagaattttaatagtaaacggttgttttttagttattagattattagggagtggggatgttgtagttttattttggaggtatagtttattgaaagtgaaagtataagggaattggtggagagagaaaaaattttatgattttaaagtttttttataagttgggcgcggtggtttacgtttgtaattttagtattttgggagatcgaggtggtagaattgtttgagttttggagtttgagattattttgggtaatatagtaagattttgttagtataaatagtaaaaaaattagttaggtgggtggattacgaggttaggagatttagaatattttggttaatatggtgaaattttgtttttattagaaaaaaaatataaaaaattagtcgggcgtggtggtaggcgtttgtagttttagttatttataaggttgaggtaggagaatggtacgaatttaggaggtggaggttgtagttagtcgagatcgcgttattgtattttagtttgggtgatagagtaagatttcgttttaaaaaaaataaaaatggtcgggcgcggtggtttacgtttgtaattttagtattttgagaggtcgaggtaggcggattacgaggttaggagattaagattattttggttaatatggtgaaatttcgtttttattaaaaatataaaaaataattcgggtatggtggtaggcgtttgtagttttagttattcggaaagttgaggtaggagaatggcgtgaatttaggaggcggagtttgtagtgagttaagattatgttattgtattttagtttgggcgatagagattttgtgttaataaataaataaaaataaaaatagtttttttatagatattacgatttttttgagaggtaggttggggagaagtgataggttttggtgagagtgttgattattggtatggtgttgtagtgttataaattgttgtgtttagaaaaatgagaattattttatttataatattattattattattaaaaagtttttggaattttagatttaatcgtaattttaatttatttttgtttgagtttagttttttttttgtaaaaaagtagtatttattttgtttatttaattgaggtgttgtgaggattaaaagttatattgtatttggaagtaatttataaaatggaaaacgttacgttacgtgcggtggtttatatttgtaattttagtattttgggaggttaaggtgggtggattatttgaggttaggagttgaagattagtttggttaatatggtgaaattttatttttattaaaatataaaaattagtcgggaatgatggcgagtgtttgtaattttagttatttagaaggttgagatgggagaatcgtttgaatttgggaaatagtggttgtagtaagtcgaaattgcgttattgtattttagtttgggtggttgagggagatttcgtttaaaaaaaaaaaaaaaggaaaattttgaaggaatagaatggataatattatttttaagttgtttagttgaaagtttttttttttttttttggttttgtttagattggagtgtagtgggataattatttaagtagttttaaatttcgaggtttaagtaatttttttgttttagttttttaagtaattgggattatagttgtatattagtatgtttagttaattttttttttttttttttttgagatagagttttattttgtcgtttaggttggagcgttgtggcgtaattttagtttattgtagtttttattttttaagtttttgtaatttttttgttttagttttttgggtaatttggattataggtaagtgttattatatttagttaatgtttgtatttttaatagagatagggttttattatgttttttagtttggtttcgaatttttgattttaggtgatttgttagttttagttttttaaagtgttaggattataggtatgagttatcgcgtttagttaatttttgtttttgttataaatggagtattgttatgttgtttacgttggtttcgaatttttggttttaattttttaaggtgttgggatggtatgagttattatgtttagttaaagttttttttttatgaggaaaatataatagagatgtataaagtgaataggagattttgattttagttattttttaaaagatatatgaattttttatttttgtttattaatttattataatgaatgtatattatgtgttaagaattaaaatgaatgatagtttatgttttttttgaggagattattatatgtagaattaattgtagtattgtgtaaaaggattgaatatattaattatgagtttatgaaggttgaaattattaaaagttgtatttttatatttatttgtttatttttatttatttatttaatttaaatttatatttattcgatataaatttaatatatttatttaatataaatttattgatttatttattggagggttatatgggatatagaggtagtataaaggtagaattttaggttttatttattaataggagttgtaaaggttttgggtgttttaaattacgttgtggttttagttattttataggaattttttttttttttttttttttttgagatagggtttttttttttgttatttaggttggagcgtaggtaatggtgtaattatttggttttttaggtttaggtgttttttttattttagttttcggagtagttaggattataggtatgtgttattaaattcgattaatttttttgtatttaaaaaaaatttttgaggtcgggtagggtggtttacgtttataattttagtattttgggaggtcgaggcgggtggattataaggttaggagattaagattattttggttaatacggtgaaattttgtttttattaaaaatataatataataaaaaattagcggggtgtggtggtacgtatttataattttagttatttgggaggttgaggtaggagaatcgtttgaatttgggaggtagaggttgtaatgagttaagattaattgtattttagtttgggtaatagaaaatttttagtcgggtatagtggtttacgtttgtaattttagtattttggggggtcgaggcgggtggattatttgaggttaggagttcgagaatagtttggttaatatggtgaaattttatttttattaaaaatataaaaattaggtcgggcgcggtggtttacgtttgtaattttagtattttgggaggtcgaggcgggcggattacgaggttaggagatcgagattattttggttaatacggtgaaatttcgtttttattaaaaatataaaaaattagtcgggcgtggtagcgggcgtttgtagttttagttagttattcgggaggttgaggtaggagaatggcgtgaattcgggaggcggagtttgtagtgagtcgagatcgcgttattgtattttagtttgggcgatagagcgagatttcgttttaaaaaaaaaaaaaaaaaaaaaaaaattagttgggtatggtagcgggcgtttgtaattttagttatttgggaggttgagttaggagaattgtttgaatttgggaggcggtggttgtagcgagtcgagattatgttattgtattttagtttgggtgataaagcgagatttgttttaattttttttttgaggtaggtttcgttttgttatttaggttttatatataggtttcgttttgttattttgggaggttgaaataggaggattgtttgaggttaggaatttaagattagtttgggtaatatgggaatatttgagtttgggaggttaattttttttttaattggttaggtgtggtggtgtgtatttgtagatttagttattcgggaggttgagtttaaagggtcgtttgagtatataagtttgaggttgtagtgagttatggttatattaaaatattttagtttaggtaatagggtgagattttgatttaaataataataaacgtaaagatatttttttttttttttgagacggtgtttcgtttttgtagtttaggttggagtgtaatggtgcgtaatttcggtttatcgtaatttttatttttcggttttaagcgatttttttgttttagttttttgagtagttgggaatataggtatgtgttattatatttagttaattttgtatttttagtagagacggggtttttttatgttggttaggttggtttcgattttttgattttaggcgatttgttcgtttcggttttttaaagtgttgggattataggggtgagttatcgcgttcggttaagatatttatttaagatagttttttttttttttttttttttttttttttttttttgagacggagtttcgttttgttgcgtaggttggagtgtagtggcgcgattttagtttattgtaagtttcgtttttcgggtttacgttatttttttgttttagtttttcgagtagttgggattattgggattacgggcgttagttattacgttcggttatttttgtatatttggtagagatggggttttatcgtgttagttaggatggttttaattttttgatttcgtgatttgtttatttcggtttttttaagtgttgggattataggcgtgagttatcgcgttcggtcgtttttttttttttgataaggtttttttttttttattgttttatagttttaagtgtttttttttataatttttatacgcgttttatggattgtttaatgtgcgttttttttattaggttgttagttttattttagtagtaacgattgttttgggttttttttttttttttttttttgaaacggagtttttttttgttatttaggttggagtgtaatggtgtgattttagtttattgtaattttcgtttgtcgggtttaagcgatttttatgttttagttttcggagtggttgagagtataggcgcgcgcgttacgttcggttaatttttgtatttttagtaaagacggggttttattatgttggttaggttagtttcgaatttttgattttaggtgattcgttcgtttcgattttttaaagcgttgggattataggcgtgagttttcgcgtttggttttgggttattatagtatatttttagtatttagtatagtggttgttaaatacgtatttcgtgattaggtatattaattttttaatattaagttcggaattaatttatatgttttaaagtatatcgagaaatataaattgttttatagaatagtttaagatgacggtttcggtgcgtttggatcggtattagttgtttagttaattttaagaaattaaggaatggttggtttatagtaggattgtatttagttggtttattttttttttcgtgtttttattcgtttttagggaattaaaattaagggagttaaaattttaggttggtaatcgtgaggtatttggtgtttagtaaatttattcgaggtcgcgatattcgtagcgttttcgggggcgaacgtaaggttatattgtttagttttcgttttagtttagattgggtttttttaggttacgcggggttgattttggggtttattgcggttgcggagttttttttttagtttgcgggtttagtcgtttttttagtatcgtagagtttttcgagggcggtttattttttttagggtcgtcgtttttagttttttttttagagtttttcgttaagggttcgttgtatttattttcgtagacgcgtagttgtatcggttttagattacgatttattataattcgttacgtttcgtttaattagagcgcgtcgacggaaagtgtttcgtcgcgttttattttatgagatattattggttaattaatatgttagttaaattgaggacgaattcgtttattagtggatttttgggaaggcggttttaatttggttgatgtaattgcgagaaaaggtgggatggggtgcgttatatgatcgagttagattttttttcgtttttttcgtttttttacgttttcggttttcggaggtcgatattttggtttttataggtaaagttttaatattataattgatatagttaaaaaggggagacggtaacgtgtttggtagaggttatatattttgttatagttgtttattttagttgttgagtgatatatagtttttaaagagtttgatattgtgtttatggttatatttgttcgggggagattttgaatttggtgtggaagaaataatattagtagtttaggtacgattggattagtatttggttttcgatttgtttttggaaaaaaaaaagttaatatttataggtttgggggaggagggtgaatatatatatatatatatatatatatatatgttaggtgcggtggtttacgtttataattgtaatattttgggaggttaaggtgggaagattatttgaatttaggagttggagattagtttggttaatataattagattttgtttttacgaaaaattttttaaaaggtcgggcgcggtggtttatatttgtaattttagtattttgggaggttgaggttaacggatgacgaggttaggagatcgagagtattttggttaatatggtgaaatttcgtttttattaaaaatataaaattagtcgggcgcgtatttgtagttttagttattcgggaggttgaggtaagggaattttttgatttcgggaggcggaagttgcggtgagtcgagatggcgttattgtattttagtttggttacggagtaagatttcgttttaaaaaaaaaaataaaaaataaaaattagttaggtatagtggcgtatgtttgtagttttagttatttgggaggttgaagtgggaggattatttgagtttaggaagttgaggttgtagtgagttttgatcgtgatattgtattttttgggcgatagagcgaggttttgtttgaaaaatatgtatgtatttatacgtgaggtattgtattaaatattttatatgtttattttatttgatttttaaattgtgtatgaggttagttggagttttttttttataaatgaggaaattattttgtataagtttatatttaatagtaagttgtggagataggatttaaatttgtgtttatttaattttaaagtttatgtttttaattattgtattattatttttattatttgatatatttaaatatacgggtaataaattgtgttgttggttataatttaagttatagataatatagaaaaatattattttttatgtaaaaagagtattttatataaaaagaaggttaagtttaaaagttagtaaaaatataaattatttgatttatttttttattttatagttgtttataaatagtaattattaaatttattatttattgagtatttagtatatagtaggtattaatttaagtttttaatttttataattttattatgagttattattattatttgtttttaatagagtaaaataaggtagagagagaggttaagtaatatagttgagggtaaaattaggagatataagtgtttattttgatttatagtgttttaaataatatatatttagtttaaataatttgggaaatgagttagatttttaagttattatatttaaaatagaaagttaaaaggtatgtatgaattgtatttttagaataaaataatataggttgtaattttaataatttagttttgttgttagagttgttattaggatagtatttttattaataaaataattataaatagattaaaataattttttggtttagcgtggtgatttatgtttgtaattttagtatttttgggaggtttaggtaggtagattatgaggttaggagattgagattattttggttaatacgacgaaatttcgtttttattaaaaaatataaaaaaagtagtcgggcgtggtggcgggcgtttgtagttttagttattttggaggttgaggtaggagaatggcgtgaattcgggaggcggagttagtagtgagtcgagattaggttattgtattttagtttgggtcgtagagcgagattttgttttaaaataaataaataaataaataagaattttttatttatttattaagagagattgtaggttagtatagagatttatatttgtaattttaatattttgggaggttaaggtaggaggattaatggagtttaagtgtttgaaattagtttaggtaatatagtgagattttgttaaaaaaaaaaaattttttttaattagttaggcgtggtgtattcgtttgtagttttagttgtttaagaggttgaggaaggagaattatttggagtttagaagttgaaggttttagtgagttgagatttcgcgattgtattttagtttgggtaataaagtaagatttttgtttttttttttttttttttttttttttgaggtagagttttatttttgttgtttaggttggagtgtaatggtatgatttcggtttatgttaatatttgttttttggtttagtttttcgagtagttgagattataggcgttattattacgtttagttattttttttttttttatttttagtagagatgagggtttcgttatgttggttaggttggttttgaattttcgattttaggtgattcgtttgttttggttttttaaagtgttgggattttaggcgtgagttatcgcgttcggtttttttgttttttaaaataaaaaaaagaaagaaattgtaattgaggtttaaaagttttattttaatataattatttaatgatatttttttgtgatattttttttttgtagatgttaattatatgttagaaagaatgttattttaatgtaatgtgtaaattatgtattttaggaaattattggtaagtttttgatttattttaggttaagtaaataggtttgtaggtgggagtgagcgatatgtatatggtttgttttttagtagaatatttgttgaattttattttggggtatgagaaagataattaaagaattgaaatagtataatagttgtgattgttttattattttttagtttgggtcgtagagtgaaataataggttaggtatagtggtttatgtttgtaattttaatattttgggaggtcgaggcgggtagattatttgaggttgggagtttaaaattagtttggttaatttggtgaaattttatttttattaaaaatattaaaattatttgggtgtggtggcggttatttgtaattttagttatttagaaggttgaggtagaggttgtagtgatttaagattgtgttattgtattttagtttgggagataagagggaaattttgttttaaaaaaattaaattaaattaaatttaaaaaataataaaaataataaatagaaataggtcggcgtgatggcgtatatttttaattattatattttgggattttgaggtgggtggatggtttgagtttaggagtttgagattagtttgtagtatatgataaaatttaatttttataaaaaaatataaaaattagttgggtatggtggtatgtatttgtagttttagttatttaggaggttgaggtgggaggatagtttgagatagggaagtaaaggatgtagtaagttatgatttgttattgtattttagtttgggtggtagaatgagatagtgttttaattgaaaaaaaaaagaaagaaatggaaataagtggaaaaaaaaaaaaattaatatagttttggaaggatgtagcgttagatttttaatttttttatggtattttagttatttttagtatttataaaatgggtttataatgttggtttatttggtattaagttaaatggggatggttgaatttttttttttttttttttttttttgagacggagtttcgttttgtcgtttaggtcggattgcggattgtagtggcgtaatttcggtttattgtaagttcgttttttgggtttacgttatttttttgttttagtttttcgagtagttgggattataggcgttcgttacgtgttcggttaattttttgtatttttagtagagacggggttttattttgttagttaggatggtttcgattttttgattttatgatttattcgtttcggttttttaaagtgttgggattataggcgtgagttatcgcgttcggttaaggttgaatttttaagaatttttaaaggaatattttaattgagtatattataatttttttgtttaatgtattttttagattataaaacgttaaaggaattatttaggattttaaaatattgttaaattgaataggtttggggtagggtttgagagtttgaatttttttttttttttttttttttttttgagacggagttttattttgtcgtttaggttggagtgtagtggcgcgatttttgtatattgtaagtttcgtttttcgggtttacgttatttttttgttttagttttgcgagtagttgggattataggcgttcgttattacgtttagttaattttttgtatttttagtagagacggggttttatagtgttagttagaatggtttcgattttttgatttcgtgatttattcgtttcggttttttaaagtgttgggattataggcgtgtagtcgtgttcggtcgagagtttgtatttttaataggttttaggcgatatttatgttgttgagagattatatttggaatattaagggtttagattagaggatgtgcgtttgtatttatttgtttagatgtaaaatttttaaaaagtttgat

SEQ ID NO: 2037 - DNA, 4722 bp, Artificial Sequence
  chemically treated genomic DNA (Homo sapiens)
aaatataatataaattggaaaaagtatgtagaattaatatagtttatttaaatgtgagatttaaatcgtagtaataggaaatttttttattaaattggaattttttttaatttttgtgtaagatttaaataattaaaatgtattttaatggttattgatggttttattttttttttttttttttttttttttttttttttttttttaaagaaataaatttgagtttttttattggagtagaaatatatgaattttttttaattatttaggaaattggaagtttttgggtggatatggtttttttttattgtttttttttttttatattatttttagttaaaaaaattaattgtttttagtaaagggatttttgttaaaaatttttattaggtgaatttgtattgggaatttttatgtttttttagtttgtttgtgttttttaaatagagttgaagttgtaaataaagtggaaaaatatatttttcgtttttaaatttttaaaattttattttttgtggaaaatataattttataatattaatttttaaaatttgtaagagttatagaaggtgtgaaagtagttaaatagtcggtttagaaatttaaaagttaggattaacgggggatagaatgttttttttttaaatttaggtagggatggggagtatttttagtattagggtatttatggacgttataagagggaaaggatgtatttgaacggtgggggtgatttaggcgatgaatcgttacgttaatagtattattgttaaatttttaaatttagaggttttggtgaaaaattaaatcggtggtaatttttaacgtttgtagtatttgttattttatattttagtattcggagtttggatagtttcgtaggtcgcgtttcggaggtagtatgagtttttattaatttatttatagttttattgttaacggtagttagatttaggagagatttattgaaaattttttaagatttttttttaaaaataaaacgatttttatatttaatggtttatttgaaagaatatacgtaagaaattaggagatttaaattaaatttattaataggagagtttgatgatgtttaattttagagattagagttttgattggtgaggtttgatgaaaaagtaaagagaaatcgtaattatatagttaaaaatataatttttgttatttttaaaattttaaaaattttttatttgtttttgagaaacgggtgaaattgaaaattattaaaataattggattttttaaaaattggattgtatgagtgaaaggtgtttatgagaagtcgatgatttcggattttattatttaagaggatagtatagaatagttaatatgttttttgagggattaggatgttgacgtttttttttgatattcgattattacgtgattgagaaaaaaaaaaaggaagttattttatgaataaaaatcggagcgtaatagtgtaataaaatattttgtatttaaaggtaataggtaggtagatgttgataaagagggttttttaaaaattatgttcggatagatttttgcgaattgtatagataaataggagtagaaggtcggttatttttgtaattagcggtagtagtagtagaagtcgtagttttagaggtagtcggagagatttcggagtagagaaggcgtcgtcgattttcgcggttgtttggttcgcggtttttataaaggcgggttagtcgttcgtttttttttttgttttttttttttttttttttgatttttttttttttttttaatcgtttgttttttttttcgggtggatttacggttattttgttttttcgcgttttattttatcgtttttttttttttttttttgtttttttttttgcgttttttttttttcgtgttacgtttttttttggttttgcgcgtttataaatttttgagtagaatacgagtttcggtaaacgagtttcgtagttttttttgttgttttcgttggtttttgcggtttttgtttagatattaacgttagacggcgatgtttttcgggtggtgattttagcgtaggaatttgaagaagcgttttgttcgtcgttttatttggtagtttttttggtagcgggaggagttgaagggtaagggagggaaaattttattaaagcgatcggtttattcgattgttgattttttcgtttggtatcgcgttaggggagttagtttttttttagtcgggtttggttagttattgggcgtcgggtagatgtatatatatatatttttttttaattatagtaagtaagaagtggtagggcgcgtatcggttgtcgttaagtgttgtttaatttagggagtcggggtttcgtttcgtttttttttcggtttttagagttttttggggttggagggtgggaggttaggggcgtttttatagttgtgtgtttttttttttattttgcgtagaatgattatgtgtagcggagcgaggttggttttgttggtttatgggataattatgtatagtagcgtttatagtttatttgtcgtcgtcggatttcggtttttcgggattaggtaggtgttggttgtttggtttaagtaggagttggggttttttaggtatagacgtttttttacggttttttttttgtagttttttgggtttagattattagtatcgttttttgcgttttcggtgcgttttcgttagtttcggttggatagcgggtttttattttagtcgagggtttggtaggtttcgcgattgttcggacgttttttttagttttaggtagtttagggtttcgggtagagttagtgagtttttggtcgttggagaatttttttttttttaattcggtttataggatgggggtagggtacggtttttagtttggttttttttatttatttttgggacgagttaggagaattttagttttggagtttggtcgggggttgagcgtgaagttttttcggattttgttttgttattgtttgttttggattattcgggtggggttttttttttttttttattttttttttttattttattttaatttttttttttgaagagtttttttttaagtgattcgtgttttaattgtattttgaattttaggttgttttggggggcgtgcggtggggagggtgttggttcggtgtgattgaggaaaagcgatttaagagagggaagaataaggacgagattgcgaaggagggggaaaaataggcgtaaaggaggaggaagggaaagttagtaggtaggtaggatcgggagagtagttttgtttggttcgggatggaggaattttggttttttttttaatttcgggtttttaatcggtaggcgcggtttaggttttcggaggtagttttagagtcgcggatcgatgtgttaggttgtggatgagttttgggtaggggagggttcgtattagcggcgtttggggtagcgaggagcgcgcgttttgtttgcgaagttgtttttttcgagtttcgtttaggaatattagttttggggggtcgttgattattgatttggacggagagatgggttttgggttttgtattaggattttagtatttgggttcgaggtagggtaatatttagaaagattttagggttcggggtattcgggttagggttgaggcgtatcgtcgagtaaaggttgggtgcgaggcgtgcggaatgatgcgtttgttttgttcgggtttttttaaggatggagaaaaggcgagtgaagtagcgaagtacgattttaatttcgtttagagagtgttattagcgttggttgtacgttaagtttttttaggggtttaaagcgagagggatttgttttaatttatttttattcgttttgtgttaagaacggaggttgtagagggcgattgcgaagtcgttaggtattcgttggatttcggttttttttttcgtgttttggggttgagatggggtatcgttatcgataatagattagcgcgaattattcgtttagtggttttaaaatattttggttttatttttagttatttttaagttttcgtgtgtttggtatttttttcgtgcgagaagtatcggagggtgcggacgcgttatagtttgagtcgtcgtcgaattggttaagtttaggggtatttattatttatgtttttgttagattttcgtttgtttaaaatagaaatcgaggtttttcgtgatttatatttgttcggagaagggtttttttgggttcggaggttggggtgggggtggttgaggagttggttttcgtacgttttacgtatttttttttttgttttttgggtttttttattcgggttttcgcgtgggttagcgttcggttttttagggtttttttcgttttcgttcgttgttgttttggggaggttcgggagttaggcggggaggggggcggttttttttcgtagataggtgtgcgcgatcggcggagacgtttcggttttttagcgtttgttgaggtcgtggttcgtaggacgattttttattcgcgaagggggggtgggcgggtcgttcggcggggtaggagtggttgggtgtcgttgttttttttttatttttgtttttatttttagttttgggagaagagataatttttagcggaggatttttattatttgtgaaaattcgcgcgagttttttattttggattttcgtcgagttggggaggaatttgtattgattatattttttgttttcggttatttcgtagg

SEQ ID NO: 2038 - DNA, 4722 bp, Artificial Sequence
  chemically treated genomic DNA (Homo sapiens)
tttgcggggtggtcggggatagaaggtgtggttagtgtaagtttttttttagttcggcgaggatttaaagtaaggggttcgcgcggatttttataggtgataaaagtttttcgttgagaattgtttttttttttaggattgggggtgggagtagaggtaaggaggaggtaacgatatttaattatttttatttcgtcgggcggttcgtttatttttttttcgcgggtaaagggtcgttttgcgggttacggttttaataagcgttgggaaatcgaggcgttttcgtcgatcgcgtatatttgtttacggaaaaggatcgttttttttttcgtttggttttcgagtttttttaaagtagtaacgggcggggacgagaaaggttttgggagatcgggcgttgatttacgcgaagattcgaatggggaggtttagaaagtaaaggagaggatgcgtggggcgtgcgggggttaattttttagttatttttattttagttttcgagtttaggggagttttttttcgagtagatgtaggttacggagaatttcggtttttattttgggtaggcgaggatttggtaggaatatgaataataaatgtttttaaatttagttagttcggcggcggtttagattgtggcgcgttcgtatttttcggtgtttttcgtacggagaaagtgttaggtatacgggaatttgaaaatagttgagggtgaaattagggtgttttaaggttattaaacgaatagttcgcgttgatttgttatcgatggcggtgttttattttaattttagagtacgaggagggggatcgagatttagcgagtgtttggcgatttcgtagtcgttttttatagttttcgtttttgatataggacgggtagagatgggttaaaataaatttttttcgttttggatttttggagagatttggcgtgtagttagcgttagtagtattttttgggcggggttggagtcgtatttcgttgttttattcgttttttttttatttttggagaggttcgggtaaggtaagcgtattatttcgtacgtttcgtatttagtttttgttcggcgatgcgttttagttttggttcgggtatttcgaattttggggtttttttggatattgttttgtttcgagtttagatgttggaattttaatatagaatttagaatttattttttcgtttaaattaatgattagcggttttttagagttaatgtttttgggcggggttcggagaaggtagtttcgtaggtagaacgcgcgtttttcgttgttttaggcgtcgttggtacgaatttttttttatttagggtttatttatagtttggtatatcggttcgcgattttggggttgttttcgggaatttgggtcgcgtttgtcggttagaaattcggggttaagaaaaaagttaaggtttttttatttcgggttaggtagggttgttttttcggttttgtttgtttgttggttttttttttttttttttttgcgtttgtttttttttttttttcgtagtttcgtttttgttttttttttttttaagtcgtttttttttaattatatcgggttaatattttttttatcgtacgttttttaagatagtttgggatttaaaatgtagttggaatacggattatttgaaagaaagttttttaggggaaagaattggaatgaaatgaaaagaaagggtggaggagagagagagattttattcggatagtttagaataagtagtaataaagtaaagttcgagggagttttacgtttaattttcggttaggttttagagttgaagtttttttaattcgttttaagaataggtaaaagaaattaagttaggggtcgtgttttgtttttattttgtgggtcgggttgggggagggggggttttttagcggttagaagtttattggttttattcgggattttgagttgtttagggttgggggaggcgttcgagtagtcgcggagtttgttagattttcggttagaatggggattcgttgtttagtcgaggttggcggaggcgtatcgggggcgtagagggcgatgttagtagtttggatttaaaggattgtaggaaggagatcgtgaggaagcgtttgtgtttgggaagttttagtttttgtttgggttaggtagttagtatttatttgatttcggggaatcggagttcggcggcggtaggtgagttgtagacgttgttgtgtatgattattttatagattagtagggttagtttcgtttcgttatatatggttattttgcgtaggatgggaaagaggatatatagttgtgagaacgtttttggttttttattttttaattttaaaaagttttggaagtcgggggagggacggagcgaagtttcggttttttgagttgaatagtatttggcgatagtcggtgcgcgttttgttattttttgtttgttatagttagaaaaaaatatatatatatgtatttattcggcgtttaataattagttagattcggttgaaggaaagttaatttttttgacgcgatgttaagcgaaagaattagtagtcgagtgagtcggtcgttttggtaagatttttttttttttattttttaatttttttcgttgttaggagagttgttaggtaggacggcgggtaaagcgtttttttaagtttttgcgttggagttattattcgagaggtatcgtcgtttggcgttggtgtttgagtagaagtcgtaggaattagcgggagtagtaggaggagttgcgggattcgtttgtcgaggttcgtgttttgtttaaaagtttgtagacgcgtagaattaggagggagcgtgatacggagagaagggggcgtagagagagaggtagaagaaagaaagagggggcgatgaggtgaagcgcggaggagtaaggtggtcgtaagtttattcggaggaagaagtaggcgattaagggaaagagggaaagttagaaaagaaggggaggaaggtaagggagagggcgggcggttagttcgtttttgtaggagtcgcgggttaggtagtcgcgagggtcggcggcgttttttttgtttcgaggttttttcggttgtttttgaagttgcggtttttgttgttgttatcgttggttatagaggtgatcggttttttgtttttatttatttgtgtagttcgtaaaaatttattcgaatatggtttttggagagttttttttgttaatatttgtttgtttgttgtttttaagtatagaatattttgttgtattgttgcgtttcgatttttatttatgaaatgatttttttttttttttttttagttacgtaatgatcgggtattagaaaaagacgttagtattttagttttttaaggaatatattaattattttgtgttgtttttttggatgataagattcggagttatcgattttttataaatattttttatttatataatttaatttttaagaagtttaattgttttgatggtttttaattttattcgttttttaaggataggtaaagaatttttagaattttgaggatgataaaagttatgtttttaattatataattacgatttttttttatttttttattaagttttattaattagagttttggtttttggaattaagtattattaagtttttttattaataaatttaatttagattttttaattttttgcgtatgtttttttagatagattattaaatgtggaagtcgttttgtttttaaagggaagttttggaggatttttagtaaattttttttgagtttggttgtcgttgatagtagggttatgagtagattgatgagagtttatgttgttttcggagcgcggtttgcggagttgtttagatttcgggtgttgaagtgtagggtaatagatgttataaacgttgaaaattgttatcggtttaattttttattagagtttttaaatttgaagatttggtagtagtgttattaacgtggcgatttatcgtttaaattatttttatcgtttagatatatttttttttttttgtagcgtttataaatgttttaatgttgagaatgttttttatttttgtttggatttgaggaaaaagtattttgtttttcgttagttttggtttttggatttttagatcggttgtttggttatttttatattttttgtggtttttatagattttaaaaattgatgttgtgaaattgtgttttttataagaagtgaaattttaagaatttgggggcgagaaatatgtttttttattttgtttataattttagttttgtttgggagatatagatagattgggaaagtatgagggtttttagtataagtttatttgatgaaggtttttaataggaatttttttgttggaaatagttaatttttttaattgaaaatgatgtgggaagaggaaagtaataagggaagattatatttatttagaggtttttaattttttgggtaattgaagaaggtttatatatttttattttagtaagagaatttaggtttatttttttaaaaaaaaaaaaaagaagaagaagaaagaaagaaagaaaatagagttattaataattattagagtgtattttaattatttggattttatataaaaattaggggaaattttagtttagtgggagggttttttgttattacgatttggattttatatttaaataagttatattagttttgtatgttttttttaatttatattatattt

SEQ ID NO: 2039 - DNA, 4274 bp, Artificial Sequence
  chemically treated genomic DNA (Homo sapiens)
ggttgacgtttcgtttaaaatataatattatagtaacgttgaaatcggattaattattattattatttttttttttatattattggatttatttttaaatttaaaatatatgttataggatttaaggagtttttttggtttatttattttttttaatttataagttttatgtttacgttttattgttttataaaaatttttatttattttttaggaattgttggaatgggagtttgggaagttttagtaaattttttttttttttttgtggttattatatttttaaagttggttttttttttatgacgagttttttgaggggttgtattttattttttgtgtttttaagtatatataatgtgtattaggggaggaagtattcgttagtggagtataaagttgttgtaggttttttattggtttttaggcgtttttagtgaaattttcgtttttttatcgtttatatttgtaatttgtaagttttatttacgataattgttgtaaagttatacggggaagttttttttcgataaaaaaaacgagttttgtaataagttcgtcggattttagtaatgaaatcggcgtcgtgtagtttcgtcggcgagtgtattttggaacgtataatttagcggtacgtattatagttcgagtatcgttttttcggttggagttattgtaagttttttttacgtttcgtttttttcgttaggcgttcgttacgtttatgttttcgtcgttgcgcggtttatttcggatgttagtttttcgcgtcgattagaattcgtgaatatggcgaacgaggtagggttcgttgagcggagggttttgagtttaagggagggagtgtatggtatgggattaggttgttattttcgggggcgcgcgaggttcggcgtttaagacgggatttggtttttggttttgaaattgggtttttagcgagcggtttagaggggtagaaagagaaggaagttttgtttcggttttttagttgggaagtagttttttttgttgtttttgggatagtcggaacggggtgggggggtgggagagtcggagagtggggggtaggggttggttaggtcggtattttagtggaaatggtttaggagcggttacgtattgttttttatacgaaattaagtaattcgttttgggttatttttgtagtttgtatatttggtagagttgtagttagatttcgtgtttttaatttttaggttgtttgtgttgtataattgagtttacgttttaattattgtgtttttaaggagtgtattttggaaagatttttacgttttttttagaaatattttcgagtatttaaatattaagagatttatattttttttagtttttacgtaataaatatttttgcgaggtgttatttttattttattaaaaattgaggtttgaggttggttgtgtttggttatattaacgatggcgagttgggatttcgatttaggtttgtttttttatgataaatttataaaatataaattagatagtaaagaaaggtagaaattacgaataatatatttagtttaaagttgttgattattttaatgttttgtaattttggatattttttagtaagataaatggttttaaatatattggagtttgaaagaaataaattttaaatagttttttagatttaaattggtagttgtttttttttattattgagtgtttttatttagagaaggtgaaagattataattgttattatagtttaaatgttgaagtagggttatttttcgcggatttagagtggggttttgttttgtttagaattgttagtaaaaggaaaaggttaggttttattaagatattttttaaaggggagtaggttattaaatttagtatttttgtttttttggatttttatgttgtataatttaattgttagtattttgaatttgatttgtggagttgaaatttatggtatattgaaatgaaaaaggttttaatgtagtgtttgattttttgtattatgagatttaatatttgtaatttaattttaaaaacgattatttttatatttttaattttattaatttatagaggttattttttttttttttttttttttcgttagtttagacggagtttcgttttttgttttttaggttggagtgcgatagcgcgattttgggttattgtaatttttgtttttcgggtttaagcgatttttttgttttagtttttcgagtagttgggattatcggcgttcgttattatgttcggtatttttgtatttttagtagagacggggtttcgttatagtggttaggttggtttttaatttttgattttaggtgattcgtttatttcggttttttaaagtgttgggattataggcgtgagtttttgtattcggtttatagaggttattttttatatttttatgtagtttatttttttttttttttaatcgtttgttttgttgttattaataattattaatttattttgtaaagttatgttgtgttaaggattgtgttagggattttatattttttttttttttttttttttttttttgagacgtagttttgttttgttatttaggttggagtgtagtggcgcgatttcggtttattataagtttcgttttttgggtttacgtcgtttttttgttttagttttttcggtagttgtgattataggcgattgttattttttttggttaattttttgtatttttagtagagacggggttttatttagttaggatggtttcgattttttgatttcgtgattcgttcgtttcggttttttaaagtgttgggattataggtttgagttatcgcgttcggttagggattttatatttttttttatttagtttttataattattttatatgtaggtgttttattattatttataattattttttttttattttttagtattttggttagaagtgaagtttttttaaattaagtaaagttatatttttaatttattttttttgttttttgtattattttgtgtttgtttttttaaattatattttttgtaattattaattttaaagtttgttttttgtaaatttagtggtttataatttttagtttgtttatatattttttaagtgtaatgtaaattaattagaattttttttattacgtgtgatttttttgtaatggagggtatatatgattataatttttaaagtaggtttgtgtgttataattagttacgtgtaattttaaatttttagtagttttattaaaaaggaaaaagtgaagttttaatattttaattatgttaaattatattatttataatgttgttataaataaattattattttaatatgtaagtagtatttttaaaaatattgttgatgagatatttttatttttttttgaattaagtttttaaagtttagttatatttatagtatattttagttttgtttgtttgtttgtttgttttgagacgatgtttcgttttgttgtttaggttggagtgtagtggtataatttcggtttattgtaatttttatttttcgggtttaagttatttttttgttttagttttttgagtagttgggattatatagatgcgtattattatgtttagttaatttttgtatttttgtagagatgaggttttattatgttggttaggttggttttgaatttttgattttatgatttgtttattttgtttttttaaagtgttgggattataggcgtgagtagttaagttcggttagtggttattttttaagagtttagtagttatatttggtaagtggttgttgtattggtcggtgtagttataagggatatagttttttattgttatatttttaatttttttttttattttgtagttttgtattaagtcggtggtatttagaatagtttgagtaaaagaatttttttaggtatatgttaagtatgtagattttttggattttatgttagatttgttgaattagattttttcggaatttgtgtttttaatttgtttttgtatatgtattgtagaaggttattaaatatttgatgagtataattttttaattaaaagatatttttttatttgattaggtaattattttaattaaattatttttgatgtatattatttgtgtgaaatttaaaaatatattatttggaagtatatgtttttttgtgaatttgtgatatattttttaagattagtattaatttgtatttaaattggttattaagtagttatttgtttaggaggataaatagtttatttttttttttttttattttagg

SEQ ID NO: 2040 - DNA, 4274 bp, Artificial Sequence
  chemically treated genomic DNA (Homo sapiens)
tttgaagtggggaaaaaagggaataagttgtttatttttttaaataagtaattatttaatagttaatttagatatagattaatgttaattttaaaaagtatattatagatttataaagaaatatatgtttttaagtgatatgtttttagattttatataaatagtatatattaaaaatgatttaattgagatgattatttggttagatagaaaagtattttttggttaaaaagttgtatttattaaatatttaatggttttttatagtgtatatgtaaaagtaggttaagaatataagtttcgagagaatttgatttagtaggtttggtatggggtttaagaaatttgtatgtttaatatatgtttgaagaaatttttttgtttaggttgttttgaatattatcggtttggtgtaaaattgtagggtgggaaggaggattaggagtgtaatagtgaggagttatattttttgtaattgtatcggttaatatagtagttatttgttaaatatgattattgagtttttagaaaatgattattggtcgggtttggttgtttacgtttgtaattttagtattttgggaggataaggtgggtagattatgaagttaggagtttaagattaatttggttagtatggtgaaattttatttttataaaaatataaaaattagttgggtatggtggtgcgtatttgtgtggttttagttatttaggaggttgaggtaggagaatggtttgaattcgggaggtggaggttgtagtgagtcgagattgtgttattgtattttagtttgggtaatagagcgagatatcgttttaaaataaataaataaataaataaaattgagatatgttataaatatagttggattttgaagatttagtttaaagaaaagtaaaaatattttattaatagtatttttaaaaatattgtttatatgttgaaatggtagtttatttataataatattataaataatgtaatttaatataattaaaatattaaaattttatttttttttttttaatgaggttattgaaaatttaaaattatacgtgattaattatagtatatagatttgttttagagattatagttatgtatattttttattataagagaattatacgtaatgagaaaggttttaattagtttatattatatttgagaaatgtgtggatagattaaaggttgtaagttattgggtttataggagatagattttaaagttaataattataaagagtgtgatttaaagagataggtataaagtaatatagaaagtaaaaaaagtaggttaagagtgtaattttgtttggtttgggagagttttatttttaattaggatattgaaggatgaggaaaaggtaattataaatggtggtaaaatatttatatatagggtgattgtgagaattgaataagaaagaatatgaagtttttggtcgggcgcggtggtttaagtttgtaattttagtattttgggaggtcgaggcgggcggattacgaggttaggagatcgagattattttggttaggtgaaatttcgtttttattaaaaatataaaaaattagttaggggaggtggtagtcgtttgtagttatagttatcggggaggttgaggtaggagaacggcgtgaatttaggaggcggagtttgtagtgagtcgagatcgcgttattgtattttagtttgggtgatagagtaagattgcgttttaaaaaaaaaaaaaaaaaaaaaaaaagaatatgaagtttttaatataatttttggtatagtatagttttgtaaaataagttagtagttattggtagtaatagaataaacggttgagggaaaggagaggtgaattatatagagatataaaaaatggtttttgtaggtcgggtgtaggggtttacgtttgtaattttagtattttgggaggtcgagatgggcggattatttgaggttaggagttggagattagtttggttattatggcgaaatttcgtttttattaaaaatataaaaatatcgagtatggtgacgggcgtcggtaattttagttattcgggaggttgagataggagaatcgtttgaattcgggaggtaaaggttgtagtgatttaagatcgcgttatcgtattttagtttgggaaataaagagcgaaatttcgtttgaattggcgggggaggggggggggagggaaatggtttttgtaaattggtgaggttggaaatgtggaaatgatcgtttttaaaattaaattgtagatattaaattttatagtataaagaattagatattgtattagaattttttttattttaatgtgttataaattttaattttataagttagatttagaatattaataattaagttatgtaatataggaatttaaagaaataagaatattaaatttgatggtttgtttttttttaaaaaatgttttaatggagtttaattttttttttttattgataattttaagtaaaataaagttttattttaaattcgcgggaaatggttttattttaatatttgaattatagtaataattataattttttattttttttgaataaagatatttagtaataaggaaaagtaattattagtttaagtttgaaagattgtttagagtttattttttttaaattttaatatgtttaaggttatttgttttattagaaaatgtttaaaattgtaaaatattaaaataattagtaattttagattgagtatgttattcgtaatttttgtttttttttattgtttaatttgtattttatgaatttgttatagaggagtagatttgggtcggaattttagttcgttatcgttggtgtgattaagtataattaattttaaattttagtttttggtaagatggggataatatttcgtagaggtgtttgttacgtgaggattagagggaatataaattttttggtatttaagtgttcgaaaatgtttttgaaagggacgtaggggtttttttaaaatatattttttggaggtataataattaaggcgtaggtttaattatgtaatataagtaatttaggagttagaagtacgggatttggttgtagttttgttaagtatgtaagttgtaagaatgatttagagcgagttatttaatttcgtgtaagaagtaatgcgtggtcgtttttaagttatttttattgggatatcgatttgattagtttttgttttttatttttcggtttttttatttttttatttcgtttcgattgttttagaagtagtaaagaaagttgttttttaattgaagagtcgagataaagtttttttttttttttgtttttttgagtcgttcgttgggggtttagttttagaattaagagttagatttcgttttgggcgtcgagtttcgcgcgttttcgaggatagtagtttagttttatgttatgtatttttttttttggatttagggtttttcgtttaacgggttttatttcgttcgttatgtttacggattttggtcggcgcggggggttgatattcggggtgggtcgcgtagcgacggaggtatgggcgtggcgagcgtttagcgaggggggcggggcgtggggggggtttgtaatggttttaatcggaagggcggtgttcgagttgtggtgcgtgtcgttaagttgtgcgttttagggtgtattcgtcggcgaggttgtacggcgtcggttttattgttaaaattcgacggatttgttgtagaattcgttttttttgtcgggaaagggttttttcgtgtaattttatagtagttatcgtagataagatttgtaaattatagatgtggacggtgagggaacgggaattttattgaaagcgtttgagaattagtaagagatttgtaatagttttgtgttttattggcgaatgtttttttttttaatatatattatgtgtgtttggagatataaggagtaagatatagttttttaagggattcgttatagggagaggattagttttgggaatatagtggttataaggaggagagaggagtttgttgaaattttttaagtttttattttagtagtttttgaagagtaggtaggagtttttgtgagatagtagagcgtgggtatagaatttgtggattgagggagatgagtagattaaaaaggttttttgaattttgtgatatgtgttttgggtttaagagtgggtttagtagtgtagaggagaggataatggtagtagttggttcggttttagcgttgttatggtgttgtgttttgagcggagcgttaatt

SEQ ID NO: 2041 - DNA, 5743 bp, Artificial Sequence
  chemically treated genomic DNA (Homo sapiens)
agttaaaagttggttgggtgcgtggtttacgttggtaattttagtattttgggaggtcgaggtagtcggattataaggttaggagttcgagattagtttggttaatacggtgaaattttatgtttattaaaaatataaaaaaaaaaaagaaaaaaaaagaaaattagttgggcgtggtggtttatatttgtaattttagtattttgggaggttaaggcgggaggattacgaggttaggagttcgagattagtttggttaatatggtgaaattttatttttattaaaaatatatatatataaaaaaattagtcgggcgtggtggtttatatttgtaattttagttattttagaggttgaggtaggagaattgtttaaatttaggaggtagagggtgtagtgagttaagattatgttattgtattttagtttgggcgatagagtaagatttcgtttttaaaaaaaaaataaaagaaagaatttaaaagttatataaatattaaattaaaagggattggtttttttattgggaattgaatttaggttatggtagtgaaagtatagaattttaagtagtttttaagatgtagtagtttttattgtgaattttgtagggatttaaagtaatggtttgcgcgtataaaggattttaatttgttataggttagatttttgttttttaattttgtgaagaggatttttaaggttagttataatattattatgtgttttttttttaatttttttataaatataaataaggtaattgtttagaatgagagatttttaaaatttttttttttttttaatttagggatttttttaatgtaaaggatttattttttggttattgataattagaatttttaatgatgtatttattttaatagtaatttaatttaagaagtttttttatggaaagtttaaaagattattttttaggtttagagagggtatagaagaggaggttttaatgatgtttttaaaatttatttttaggaataggtaaagatagtaaaagatttttgtttttagagatagttaaggaacgtgtttgtatatatagtgtttttagtaatatataatttgttaggggttgttagttatagatttattaatttgtaatatagggtaggtttgttgggattgggttttttgaggattgattaggtaataaatattgggatgataaaagttttttatggatgggtttgaggagagtaaaaattatttggcgattattaaatattaaataggtttttcgaggtaaaattttttatttggggaaaattaaaagtaattaaatttttttattatttaaagtaggtatttggttttagatttttttttttaaaaaacgtgtaagtaattataatttttatgtgtttttagaatattatgacgaaatttattgtataatcgtcgttgatattaaggtattaaaattattataaatgtaattatttattatgatttacgtggttaatatggtttaaattattgttaagtttttattttaaggtttataaatgtttttaaggagaaatttattcggcgtatttagtttttttgttgaggtattttattgtatttttttgtagtattttaataaattttttttttttttttttttttttttttttttttttttgagatggagttttatttttgttgtttaggttggagtgtaatggtatgattttagtttattataatttttattttttaggtttaagcgatttttttgttttagttttttaagtagttgggaatataggttttcgatattatgtttagttaattttttgtatttttagtagagatggggttttattatgttggttaggttggttttgaatttttgtttttaggtgatttatttgttttagtattttaaagtgttgggattataggcgtgagttatcgtgttcggtaaatttttttttttttttttttttttgagatagttttgttttgttttagtttattgtaattttcgttttttaggtttaagtaatttttttgttttagttttttaagtagttgggattatagttacgtattattatatttggttaagttttatatttttagtagagatagggtttttttatgttggttaggttggttttaaatttttgattttaggtgatttatttattttggatttttaaagtgttgagagtataagtatgagttattatgttcggttaaattttttttttttaaatttattgtcggtaaattttttttattaattcgtaagttgattattatttttagtgtcggggttttgatagttcgtttggtagggattttttaagataaattaaaagtttgatatatttagaataaaaacggtgttgtttaaaatattaaatgttttgggtttttaattatttttagattgattataaaatgtgatttgcgagttattatttcggattggtagaggttaagagagtgtttttgaggtaggaggtgggatttagttgatttagttgaggattggttaaaatagggttggggtaatagtagtttttagttagatatgttcgttattgtgttatgttagtttattattgttatggtaatatttaggagttgttatttttttttatggtaatgatttaatgatgattattttttttttagaaatttttgtataaattattttttaatttatatgtaattaaaagtgcgtataaatgtgattgtaaaattgttttgagttgttatttttagtttacggggtggttttgttttgtaggagtagttatagagttttaacgttatttgtttaataaagttgtttttttttatttttggtttgtttttgaatttttttttgggtaaagttaaaatttttattggttaagttttattttggggtttgtttggtttgtattatttttattcgtttataatttaagtttttaaggatattaaaagagaggagaattttatttagtttttagtttagggatttatagtaaagtttgtttaattagacgtattcgattagagttgtaaaattgattagtttgtaggacggttttaagacggggtttataggggttttaggtttgtgttttattttttttatgatagaaaaatatagaaagataagaatgaaagacgattatttttggggaaaaaaagtaattaaataatatgaatataaaattaattatataaatatattttttttattaaaattttgaagaggaaaataaggtaaatagatatttttatcgtcggtttgataagattttagagaggtcgggagtttggttgttaagatttttttatttttttttttgttagtttgtcggtttttgggtttttttgacggaggtttttaggagagtgattttagttattttatcgattgtattaaaattgtaggagtttagagaaaaatttttttgtattttgagtttatagaaaattaattgataaaagttaggttagtaagaaaaaaggtatatagatttatttatgtatatagggagaattagagtgatgattttaattttttaatggggttcggaagtttatatattattttgaggttatagaaagaatatgggtttaaagtatggttatagtttatggtggaaaattaggtgattagtggtaagatcggttataggagggagagtagaggaggtttggttagtaaaggtggttttgttttatagatgaaattttataggtagtagttttgagagagaatagatggtgaatgttttttttaggtttttaaaggcgttagattgttattttttttagattaggtaaggagggttttagaggaggtttggtcgtattagtgtagattttttttatagatgtaaattttttttataaaagatagttttttagttatttttttatttttagtttttttgagtaattgttttgaatcgtgttaaggaaatatatttggaggtgatatattgtgtttttttttaagattaaaaaggttaagtttaaggttgtttaacgagggagcgaggatttaattacgttgtttttagatgagtttttttttagtagcgtaattttgtaataggttagattggattttagatatatattttatattatattacgtttttattattatacgtatataatagatatattttaaatattagatatatatatatattttaattatcgtaaatatatatacgttatatttttaatattatatatatttaatattatatatatacgtgttttaaatattatatatattttaattattatatattttaattatatatattttttaaatattaaatatattttttaattatatatatatattttttaaatattatatatttattttaaatattatatatatatattttttaaatattataaaaatatatatatatattttaaatattatatatgtatatatatttgaaatattatatatttgttttaaatattttatatatattatatatagatacgtatatagtttttcgtatttagttatagtttatacgtatatagatacgcgtacgtaggagaaagggtgttaaagtttttgttagtcgtgaaggaagagttcgtagtttatggggttgtacggttttttttgttatttgtttatttatcgggtgtttataacgtttcgcgtttaggttttttataggagggttcgagttttttagtatcggaggtttgggggcgtacgagtcgttttttttttggagaagtttcggatcgagaggatatcggatattgcgtagcgtcgagtttcgcgcgtagttcgggacgttttagttagggtcgatcgcgtagaggaagtttttagagttcgttttaagatcgtagttaatagttttaggcgtatacggcggtttcggagcgagtacgcgtagtaacgtttttcgtttcggttcgttttcggtttcgttttcggtttcgttttcggtttcgtttcgtaagggttataggttacggggcggggtcgaggcggaagcgttcgtagttcggtatcggttttttttgggttttttttagcgtttttttttcggttcgatttcgttggttagcgttaagtgatttacgttttcgattttgagttcggatcgttaggcgaggaggattagattttcgttcgagaatttgaaggtgttttggttttggaggagtttcgttttagttcgcggtttttcggtattgtcgggtttcggttttttggagttttaggaggcggtcgttagggtcggggagtatttgggttcggggttttagggaagggcggcgtttgggtttgcggtatcggaaagagtttgttggagttaagtagtttttttttttttgggatagatttttcggttttatgtttatgggggtatcgcggtttttttttttggttttggttgttggtttggtcgttgttcgttcgtttaatatcgtgttgatttttgtcgacgatttcggttatggggatttgggttgttatgggtattttagttttattatttttaatttggattagttggcggcgggagggttgcggtttatagatttttacgtgtttgtgtttttgtgtatattttttaggtaaagagggggtcgcgtttttttttcgtttcgattttttatttttttttttttaatggattgtaggggggcgggaaaaacgtttgtttttttttttagggaaggttatatttttgtttgttttagggattttgtgatttgtttcgtagg

SEQ ID NO: 2042 - DNA, 5743 bp, Artificial Sequence
  chemically treated genomic DNA (Homo sapiens)
tttgcgggataagttatagagtttttgagatagatagaaatgtggttttttttagagagagagatagacgtttttttcgtttttttgtaatttattgggaggaaagggatggagggtcggggcggggaagaggcgcggttttttttttatttagagggtgtgtatagagatataggtacgtagaagtttgtgaatcgtagttttttcgtcgttagttggtttaggttgggagtggtagagttggggtgtttatagtagtttaggtttttatagtcgaggtcgtcggtaaagattagtacgatgttgggcggacgggtaacggttaggttagtagttagggttaggaggagggatcgcggtgtttttatggatatgggatcgaggggtttgttttaagagagggagggttatttggttttagtaggtttttttcgatatcgtagatttaggcgtcgtttttttttgagatttcggatttaaatatttttcgattttgacggtcgttttttgaagttttagagggtcggggttcgatagtatcgggagatcgcgggttgggacggaatttttttaggattagggtatttttagattttcgagcggagatttgatttttttcgtttagcggttcgggtttagggtcgggggcgtaagttatttggcgttgattagcggagtcgggtcggggggaaggcgttagagggagtttaggaggagtcggtatcgggttgcgggcgttttcgtttcggtttcgtttcgtgatttgtgatttttgcggggcggggtcgggggcggggtcgggggcggggtcgggggcgggtcggggcgaggggcgttgttgcgcgtgttcgtttcgaggtcgtcgtgtgcgtttgaggttgttggttgcggttttgaaacgggttttgggagttttttttgcgcggtcggttttggttgaggcgtttcgggttgcgcgcggggttcggcgttgcgtagtgttcggtgttttttcggttcggagtttttttagaggaggagcggttcgtgcgtttttagattttcggtattgggagattcgggtttttttgtaagagatttgagcgcggagcgttatgggtattcggtgaatgagtaaatggtagggaaaatcgtgtagttttatggattgcgggttttttttttacgattagtaaaagttttgatatttttttttttgcgtacgcgtgtttgtgtgcgtgtaagttgtggttgggtgcggggggttgtgtacgtgtttgtgtgtggtgtgtgtggagtgtttgaggtaggtgtgtggtgttttaggtgtgtgtgtatgtgtggtgtttgaggtgtgtgtgtgtgtttttgtagtgtttgagggatatgtgtgtgtggtgtttgaggtgggtgtgtggtgtttgaggggtgtgtgtgtgtggttgaggggtgtgtttggtgtttgaggggtgtgtgtggttgaggtgtatggtggttgaggtgtgtgtagtgtttgaggtacgtatgtgtgtggtgttgggtgtgtgtggtgttagaggtgtggcgtatgtgtgtttgcggtggttgaggtgtgtgtgtgtgtttggtgtttagggtgtgtttgttgtgtgcgtgtggtggtggaggcgtggtgtggtgtggaatgtgtgtttggggtttagtttggtttgttgtagggttacgttgttggggaaaaatttatttgaggataacgtgattgggttttcgttttttcgttgggtagttttggatttaatttttttgattttgaaggaaaatataatatgttatttttaaatatatttttttgatacggtttaagatagttatttagaaggattggaaatagaagaatagttgaaaagttgttttttgtgggggagatttgtatttgtggagagaatttatattgatgcggttaggttttttttgaggttttttttgtttgatttgggaagagtaatagtttgacgtttttaaaggtttgaagggaatatttattatttgtttttttttagggttgttatttgtgaggttttatttgtagaataaggttatttttgttagttaggttttttttgtttttttttttgtaatcggttttgttattggttatttgattttttattataaattgtggttatattttgagtttatgttttttttgtaattttaagatggtatataagttttcgaattttattgggaggttggggttattattttggttttttttgtgtgtatgaataaatttgtatgtttttttttttattaatttggtttttgttagttgattttttgtgaatttagaatgtagaaaagtttttttttaggtttttatagttttggtgtagtcggtaggataattaaagttatttttttgggagttttcgttaggggaatttaggagtcgataagttggtagaaagaagggtaagaaggttttagtagttaggttttcggtttttttggaattttgttaagtcgacggtaaaaatgtttgtttattttgtttttttttttaaagttttaatgagagaaatgtatttatgtgattagttttgtatttatattgtttgattgttttttttttttagaaatagtcgttttttatttttgtttttttgtgtttttttgttataaagagggtagaatataggtttaaaatttttgtaaatttcgttttggggtcgttttgtaggttagttagttttgtagttttgatcggatgcgtttagttagatagattttgttgtgggtttttgaattgaaaattggatgagattttttttttttttgatgtttttgaaagtttgagttgtgagcgagtgggaatgatgtaggttaggtagattttagagtggagtttagttagtgagggttttggttttgtttaggaaagaatttaaagataagttagaggtagaagaaaatagttttattgaataggtggcgttagagttttgtgattgtttttgtagagtagggttatttcgtaggttgagagtagtagtttagggtagttttgtagttatatttatacgtatttttgattgtatgtagattaaaggatggtttatgtagaagtttttagggaaggagtagttattattgggttattgttatggaaaggggtggtaatttttgggtgttgttatggtaatggtaaattgatatggtatagtggcgggtatatttgattgaaagttgttattgttttaattttgttttagttaatttttaattgggttaattaagttttattttttattttaggagtatttttttggtttttgttaattcgaggtagtgattcgtaggttatattttgtggttagtttgaaaatggttgggaatttaagatatttaatattttaagtagtatcgtttttgttttgaatgtgttaagtttttagtttgttttaagaagtttttgttaggcgagttgttagagtttcggtattgggagtggtggttaatttgcgggttggtaaaaagagtttatcgataataggtttgaaaaaggaaagtttggtcgggtatagtggtttatgtttgtatttttagtattttggaagtttaaggtgggtggattatttgaggttaggagtttgagattagtttggttaatatggagaaattttgtttttattgaaagtataaaatttagttaggtgtggtggtgcgtggttgtaattttagttatttggaaggttgaggtaggagaattgtttgaatttgggaggcggaggttgtagtgagttgagatagagtaagattgttttaaaaaaaaaaagaaaaaagaaagtttgtcgggtacggtggtttacgtttgtaattttagtattttgggatgttgaggtaggtggattatttgagggtaggagtttaagattagtttggttaatatgatgaaattttatttttattaaaaatataaaaaattagttgggtatggtgtcgggagtttgtatttttagttatttgggaggttgaggtaggagaatcgtttgaatttgggagatggaggttgtggtgagttgagattatattattgtattttagtttgggtaataagagtgaaattttattttaaaaaaaaaaaaaagaaaaaaaaagaaaagaaagaaagtttattagaatgttgtagaagagtgtaatgaggtgttttagtaagaggattgagtacgtcgggtggatttttttttaagggtatttataggttttaaagtggaggtttaatagtaatttggattatattagttacgtaagttatgataaatgattatatttatagtaattttggtgttttaatgttagcgacggttgtatagtgagtttcgttatggtattttggagatatatagaaattatagttatttatacgttttttgggggaagaaatttggaattagatgtttgttttagataatagggaggtttagttatttttgattttttttagataaggagttttgtttcggagggtttgtttgatgtttgatggtcgttaggtggtttttgttttttttaggtttatttataaggggtttttgttattttaatgtttgttgtttggttagtttttagaaagtttaattttaataggtttattttgtgttataggttaatgggtttgtgattggtagtttttgatagattgtgtgttattggaggtattgtatgtataaatacgttttttaattgtttttgggaataagagttttttgttgtttttgtttatttttgggagtgaattttgggggtattattggaatttttttttttatgttttttttaaatttggaaaataattttttgggttttttatgaaggggttttttggattgagttgttattggaataaatatattattggaaattttgattgttaatagttaaaagatgaattttttatattagaaagatttttaaattaaaaaaaaaaaaagattttagaggttttttattttaaataattgttttatttgtatttgtggggagattaaaggaaagatatataataatgttgtggttagttttagaaattttttttataaaattaaagagtaaaaatttgatttgtaataagttaaaattttttgtgcgcgtaaattattgttttggatttttgtaggatttataatgaagattgttgtattttggaaattatttaaaattttgtatttttattattatggtttgggtttaatttttaatagaggaattagttttttttggtttgatatttgtgtgatttttgaatttttttttttgttttttttttggagacggagttttgttttgtcgtttaggttggagtgtagtggtatgattttggtttattgtattttttgttttttgggtttaagtaatttttttgttttagtttttggagtagttgggattataggtgtgagttattacgttcggttgatttttttgtgtgtgtgtatttttagtagagatggggttttattatgttggttaggttggtttcgaatttttgatttcgtgattttttcgttttggttttttagagtgttgggattataggtgtgagttattacgtttagttaatttttttttttttttttttttttttttgtatttttagtagatatggggttttatcgtgttggttaggttggtttcgaatttttgattttgtgattcggttgtttcggttttttaaagtgttgggattattagcgtgagttacgtatttagttaatttttgatt

SEQ ID NO: 2043 - DNA, 13503 bp, Artificial Sequence
  chemically treated genomic DNA (Homo sapiens)
tataaaataaaaaatttagttaggtatggtgatatatgtttatagttttagttttttaagaagttgaggtaggaggattgtttaagtttaggaggtaaaggttgtagtgagttaagattatgttattgaattttagttttagagataggagattcggttttaaattaaataaataaaataatgtgtacgatatatatttttttttttttagtggttgatagaataagtataaatttttatttttttgtttttagtttttttgtgtttttgtatgtagagttttttatgaatagaatataatttataaaaatttggtttgataatttttaatgttttatttggtgtatttaatttatattgagttgattttttatttgtaattttaatttttttttttttatttgataattatgtttttatattttgttttttttttttattgttttttattggatttatataataaattttaattttttggatatttttttattaatttgttagttatatattagttttttattttttaaatgattattttagtaatgataatatgtatttttgataatcgaatataaatgattattgttattttttttatgattatgttgaaattttgtagttttgttttttggtttttattatttttgttgaggagttagttgttaattttatttttgtttttttaaaggttatatgttttttttttttttttttttggttgattttaagttttttttttttatttttggttttagtagtgttgtagtgttgtgttttgtgtggtttttttgtttgttttgttttgtgtttgtagagttttttgaatttgtggattaatgtgttttagatagttttggattaatttatggttattagttttgtaaatattgttttttttttgttttggtttattttagttgatataataaaaatattataaatagggtggtttgtgaataagagaatttattttttatagttttggaggttgggaagtttaagagtaaggtatattggttgaggatttgttttttggtttttagacgtttttttgttttgtttttacgtggtggaggggttgaggggtgtttttggtattttttttataagggtatgattttatttgtgaggttttatttttatgatttaattattttataaaggttttatttattaaagttattatttggggggttaggattttaatataagaatttggatgggaataggggatataaatatttagattatggtatttttattttattttttttttttttagattttatttataggtatgtttgattattttattgtgttttatatttttttggttgttatgtttatattttttattttttttatttgttttaaattttttatatttttattatttgttttttagtttattaatattgtttttaattgtgtttattttttgagtttttaattttaggtattttgttttttagatttagtatttttatttgatttttttttttatagtttttagttttttggaaaaattttttattttttatttatattttttgttttttttgtttttattttgaatatatttgttagggttgttttaaagtttttgtttaataatttttagatttggattatgtttagatatgtgttttttttttttttatgtgtttatattttattttttttttttgtttttaattagagtttttttttattttatattttttaagttttgattggatgttatatattgtttattaaaagaatgtagagtatagagattattttgggtttgaaaaaataaaaataaaaataaaagagtgtagaggttttagatggtttttatttttttttttaggtagttagattgaagttcgaattaaattaagcgagggtaggttgtagtttttataaggttcgttcgagttatggttttgttttgtttttaggtttcgtattttgttgggtttttagttagagtttggtgtgattattgggtatttttttttcggaggattttgaatttaaatttttgtttttttttatttgagattgtgtaagatttttttttggtttttagtttgggtttttaaaattttattttttatatttttagaatttggtaaatgttttaagggaaggattgggtatttgtttattttagttgtttatttttgttttttggaattttggttttttaagtttttttttgtttaaaagttttgtagtttttttcgttttttagtaacggttttttgtttgggaagattttagatttttagttttttgtttcgtgcgtagaatgtaaatatatttcggaggttgtgttgcggaggttagttttcgttttggtagttttttttttggaatgttggtttgtggttgtatattgatttttttatatatagtgcggcgtggtatcgggttttttgagtaatgtattggtcggttgttggttattgtatttattaagtcgttttcgttttttatgtttcgtggtgtgtatattttatattttagagttaagaatagaggtttttttgtgtttttgtattatttttatattttaaagattaagttttagaatagttttatttttttaatacgggagagttagttgttttatattgattttattttattttttaaattgttgtttttttttttagtgtgtgtgtgtgtgtgtgtgtgtgtgtgtgtgtgtgtgtgtttgttttggatatgtttagtttgtttacgtgttatttttagattttggaaattattgtagttttgtaggatatatgatagttggtaggggatgttttttttttttgtttttattttttaaaatttttttattttgttaaattttattgaatattttgttggaatattttgtttatcggaattgtattgaatttatatagttaaatttggggagaattggaaattttgtattgttgaatggaatatttgtttttattaatatttttttaatttttaagtattttcgattttagtatttgggattattgagttaagggatatagatttttttaaaggtttagggcgtgttgtagaattgttttttagaaattttgcgggatttgtgttttagttagggattggtgaatttgtttgtttttttttttatttcggttggaacgttttaagattttttttagttttaaaagtgtagggatttttaatataaggaaatatagatttttagaggttattttttcgtttacgttggtagttatttttggttgtgagaagagatagtggcggaagtattttggagtgtagacgcggttgtatttggtggttttaaggggttgtggtgtaggcggtacgagtttagttatattaggaatttgtttttatttagttatagggtggtttggtatattttttttttttgtagtttttggaagagttgtttgtttgagggatagttttgttttatatttagtttgttttgcggaggagttttggggagtttgggagtggtttgggtaaggtttaggagtttagcgtttgttttggttttaggtttattgtgttttttttttttttgtagatagattttttttgtttttgattttgttttaggttcgttgtgttttttttttttttgtagatagatttaggtttgttgtgttttttttttttttgtagatagattttttttgtttttgattttggagtttttaggggtagtttagaggggtttgttttttttttatagttatgaggttggggtattgtaggatgggggttttttgttagatttttttaagggtggtatttatagatggggacgattaggtagaaggttgtttttttatggaatgttagtgtggaagggttttaaggaggttttttagtttttgttttatttggatgtttttggtgatgtgggatttattattgagtgggtattttagagtatttagatagtaattggcgaaaatttttcgtgttaggttgtatgaattttgttttatggagttttggttatttttgtaattaatagttttgtttcgaggttgtttttgtttttgtgtttaggagttttatcgtttaggtcgtaagttttacggggaagtagtagtatttggttggttagttcggaaagattttttatagtggttgtttcgttattgttttgcggggagtttttattagttttttttagagttttagtattcgagaggttaaattattttggggtttttgattattatttcgttattttatagacggtaaattggggtttaggaagttgttatatagttggggtaaaggttaggtcgaagttggttttttagttttggtttgtatcgaattttttatgatttgttttttgtttttttttagtggggtttaggaatgtttttttttattttttgcgtgaattattagtaggatattgggtcgaaaacgttgatttttgttttattgtttagggttgtttgtgttgttttttttatttttgagtaaagtttttttttgttaatttagagattatattattgttgatgtggttattagttggcgtttggtgtgaagggtgtgatggggtattttagaatattgttttgttttaaagcgtttttgatatgtcgatttggagttagtattggtttttggggtttgcgcggatttggtatggagtttattagcgtttgtatttataggggaagattttttttggggggtttgtcgtgggtgtgaaggttatttttacgtttatatttaggtcgttgtgtttttgttttttttgttgggttttagtttttttaggtttgcgaagttgggttttattggtttcgttgggtttttgttttttagaattatttgcgttgttttttttttttgtggattttattttatgtatgtattatattgggagttttggaggggagtggaaaagatttgtggttttagttgtagtcggagtgtttgttttgtttttttagatattgtttttaatttatgttttttttttttttaaggtgttttttttatattggggtttttattattgcgaggagtgatttacgaaggttatagagatggtcggggtttcggtgaaggtggcggtgcgggttcgtttttttaattttcgggaaatgagtcgtgattttaagtgtattatttagatgtttggaagtattattagtgagtattagtttgtatagtatcggggtcggttatgggttgttgggggttatggttttgtgtttatgggttaggtttagtagttaatttggttttggtcgtaagagtatttttttgtttatgtggcgtgtgggtgttttggggttgttgtaataaattgttattaacggtggtgggtttataagaatagagatttacgtttatagttgtggaggttagaagtttaaagttaaggtgttagtagggttttattttttttgagtttttagggaggattttttttgtttttttcggggtttggtggttgttagttattttggtttgtagtagcgttgttttagtttttgttttcgtcgttacgtggtttttttttttgtgtgtttgtgtttttgtttttatgtggtttttttataaggatatttattattgggtttggtttttttataaggatatttatatgtttttttatatatttaaatcgtattagtattttggagtaagaattaattgttattttttagttttgtggttggttgggtttagcggggtagtttgtgttggggtttttggtgtagttgtaattgttgttgtcgttataggattaagtggtgttagttgtattgagtggtgatatgaatagttatttggtttttaggatgtggataatgatagtttttttatttataggtgtcgtgtatttattcgatatgtttttatttattatttattaggtggggaggggggcgtttcgaggggagggtatttaggttttatggaagttttttttttaggtttagttttcgaggtttgtttaggggttggagatttaggtgttattgggggtgttttgggttttgttacgttttatggaagtgagggttttgttcgggttttttgtttggtttagggatgatttttttagaagttcgtggagttttgtggttaattatggtgtagtggataggttggggagattttgttaaattttagggtatggaggttgttgcggttgtggggttttagtgtattttagggttgtattttgattgttttttatggtgaattgttttgtttgtttggtttttggaagtagatttagagatgaggatttgagtattaagagtttatttgggaggtggttttaggatgtattgtgggagattggggaagtttgaggggaagttgataaaggtgcgttcgtaagtgggtgattttcgtggtcggggttttggttttgtcggggttcgtggatgaatataatgtatttatcggttgttttgtttaggaaggttagtgtttttttaataacgttcgttgtattagttgattgtagttttggttttttgtggtcggagaaagtgtttaggtggtaggatttttgtttttaagagggaagttttaggttgcgtagagttgtgagtttggaaatgtgattttaggtgggaaatgtgattttaggtgcgaattatggttttgggtgtgattttcgatttcgggtgggaatcgtgatttttggtgagtattgtggttcggggtgggtagaggacgtttgttttacgttttaataggttttgttgtgttattgtaaggtgatttaggatattagggagggttttgtgaatttttttttattttttattgggtgtcggtagtataattgttattttagttttgtatgtggggttatggggaattttatggttggtatagtgataagaattagattcgtcgagtagttaaagattattagaagtagagtggatggaagaataaagttttagagatgggatttttttgtttttgaattttgagaatggtttagttttaggttagattttaaatgatagggttaggtaggtgggcgggttggaatgtgtgttttagaagtgacggttagggtgggcgagtggtatttttgtagttttcgatttgttttttggtttagtttttaggggtattgggtaggcggtttttttattatgtatttttttttataggatttagaaacgggagggtatagtttggaggtgagttagcgttgttaagatttcgatattggtagtattgtttagttggtgaaaggtggtttggttgaggttgcgtcggtttagatttagagagttgttagtttagagatagtagtgtaggtttggattcgagattttatgttttagtggtttttgtttgttttattttatttttttttttggtttggagaataaaagttgaattaaagttttattttacggtttaggagttagaggtcggagttatatttgtgggtagttacgttttttttagttagtgggattgaaatttgaagcgagatattttgttttaaatgtttggatttcgtttggttttgaagatattggagttttgggatttcgtttatgtgttagtagtttttgttttttagtaagttttgagtagaagtttaggtaagtttaggaggttaggagggaaatgtaggagtttttatattttttttgggtaattggtaggttttgaaggaattttttttttttaaagatgaatatatgtaagatattaattttttttgagatgtcgatttttcggggattattaaattaaattaaatgtttgtggggttatagtaaagttttgaaattaaggaggaggaaagggtcgtggatttagggtaggggtggagagtttgttagggtattttttttaggatatttggaatgttttagatattgttatttttattttcgggaaattgaagagttatagagtttaaataatatatgagattagtgttttgtttattgtagtcgaagacgtattaagaaagttagggttttaggttgtcggtaagtaaaaggtaggttgtgagggtggtagggataggtatttaggtcgtttgttggggacggtttggtgatggatatgagacgtgtgaggtcgattttattaggttgtttgcgtgaaatgtaacgaaggttatttagtaagtggttaaaggtgtgcgtttgaaacgtttattttggtgttgttttattaagttcggggtaatcgtttaaaatgttcgttagttgggagttgttgaagggatgttaagtttatttcggtagcggatttgagtgtttttgaaagtttgtgtttatagttgtgagaaagtgttatacgatgttgtggggaagggggtaaaggttagtacggagtttaagagtgaggtcgtgtgtgggtaaagggtagatgggtatttattgtaggttttgtgtgtattggatgtgtacgtgtatgggagatagtagggtgcgggggagggaaaagagtggtcgaagaatgaataattaggaaaaatttttaggaaagttgtttttattttggagaaagtaaattagtggtggttttggaagaaagtgttggaagttatgttagaaatttgagtgaagggttgagggagtttaggagagaaggatgttttttaggtttggcgtagggaagtttgacggaggaagggggttatgggttttttttttggaggttgaggggttagggtgttttagagggttgatttgtttttagataagttttaggaggatattgtagatagggtatgagagggtgcgggtggatgtttatttgttaggagtatttataggagttatcgtttttggtgattttttagttgtagtttagattaatagaattgggagtggttgttttggttggtgtgttaggtttttcggaagatggcggggattgtgcggggttttttagaggatgtcgtggggaagtgatttggttagtttgttttgtttgttcggtgaagttgttgattgtttttggagttttaaaatatgaggagaggttttattttttaaagcgtgttttgtagtttcgttgtgacgtagaaattggaagtatttgaaagtaaatttaattgttatttcgtaattattatttgtataaataattttttttatttgaatatattagatttagtagttttgtgagttagttgagttgtttattaggtgtatttcggttcgatttggtagagttagtgtaggttggtttgggggtagaagttgagtgtgagtgttttcgttttttttttttttttttatattttttgttttgaggatcggaggacgtgagggttttgagtttgtttagttattttgtagatgttggaggttggttggggacgcggatttttagttatgtgcggtttttgaagtgagtttttggagtgaggggtttggttgtgtttatgatttattcgttgtgtgatattggttagagggtatttttttgggttttagtttttttatttgtgtagtagtgaggggtggtgttgggtattttttgaggtttttaattatatttgtatttttttggttatgtagaggaggtttagggtttgggtggttttttatttttgtttttgtttatagatggggatttggatttagggtgggtgcgatttaggtttttagttttcgttgtgggtttttttaatttcgagtagtcggggatttgggtaagtttttttgtacgggtagtagtagtattcgtgtggtttttggggttgttgttatagagggttatatgttgaatggttttaaatgatagaaatgttttttttttgttttggaggttagattcggaggtttaggtgcgttgtagagtgggcgttttaaatagtatatgttttttttttcgtagtttggaggcggaagtttaattaagatgtttataggtttagatcgtgggagggttgtttttttagtttgtagttgttgtttttttgttgtgtttttgtttggtttagggagttcgggttttttttttttttttaaagttatttattttattatgaggtttttgatttcgtggtttcgttttatttttattattttataaggttttatttttaaatgttagttggttgggggttagggtattgtatatgaatttggggatacgttcggtttatagtaggtttcgttgggaagagttagtttagttcggtttttatatttggtgtttaaggtcgtaggaaagttgagattttgagaaaacggttgtattttatttttttttcgtttttttttttttagttttttttattttttattttaatttttttttcgttgtttttgtcgtttcggtgtttagttttttgtaggtttatgtagagttttgggaaggttgtttgatattgggtatttcgtcggttttggaggggtttagttttgggggtttggttagagtttggggtgggaggggatgggggtttaaaggggttggttgaggagtttagtttagtaggttttgggaggatttgttttttttttttttttttttaaatttgtataaggaaaaaattttagattttggtaaaaaaagttttttttttagtagaatcggggaggtttttgtgagaagtaggttgttgaaggaggggttgtttgtttttataggtttggcggattttagggttgggaggtgttgcggggattttggtttttagtttggttgtgcgtcgtgtgatcgggggagaggattttttttttttggagtttggggtttatttgtagtgatagaggatggtttttagttatagtatagggtgtgggaggggtgtagggttagggtggggtggggtttttagatataatatatggtttgggagtggggttgtcggtagggtagggtgggggttttagttttagtgtagggtttgggatgggggtgtaggtagggttagggtgggatgggggttttagttataatataggtttgggaggggtgggggtttaggataagtaggtttgagggatttttttaagggttatttatagttgtaattgagttttattttcgtttatttatttgtgttgttttttgttttttatttatttggtattttttgggtattatttgtgttttgttttagagggtttttattttatggagtttatggtttatgtggggtgtggtattagggttttatttgagtaaggttggtatttagggttgggtaagggtgggatagggagtaagggttagtgggggtgtggggatgggggttaggtttgtgcggggagttcgatttgagtgtagcggggtgaggcgagggggtggatggggtaggaaggggtgtggggatggggttaggtttgtgcggggagttcgatttgagtgtagtcgggtgaggcgagggggtggatggggtaggaaggggtgtggggatggggttagagtgcggcggagtgaggggatgaggtggatacggtgggtgttgttggtttgagtaaggggttttaggtttttgtgttagagttgggaggtttagtcgggttgtgttagggaaggcgttgtaattgtttttatagcgttggttgatcgtgttagggttttggaggcggcgttacgggtgttgttgggtttcggtaggcgttgaagtcgggatagtttggttttttttttgtttttgtttttggttatagtacggacgtggttttttttattttcgaggatagggttgtgatggttagtttttagtttttttttgttggttgttcggggtgtttgggtgttttttagaaatttttaggtttgggatgggggcgtaggtgggatttgaaattggatttgttttggcgataaggttgttagtgatgtttgtgttgttagtaagacgtttggttagagggggttttagtgttttgaattgttataaggaagtatcgtaaatagaagtgtgttgtttcgtgattttggaggttagaagtttgagattaaggtggtggtagaggtggttgtttttgagttatgaggggtatttgtttaggttttttagtttttggggtttgtcggttgtttttggtgtttttagtttgttattattttgatttttgtttttatgtttttatggtattttttttgtttttaaatttttttttttataaggatatggtagtattagattagggttcgtttttatggagtaggattttattttaattaattatatttgtagtaattttatttttaaatgaggttttattttgagatattgggggtaaaggttttaaaatatgaaattagggggatatagtttaattcgtaattggggtattttgtttttcgtggttttggtggtaggtttttagggtgtatgttggtacggagggtgcgggtatattggaggttgtgtcgttggtttttagtttacgttggttgaggaaaattaattcggggtagatatagttttatttttagtttttatttttaagtataggacggtgttatgagggtttcgttttttaggtttgttgatgtgatggtggtggttttcgggggttttttgattaggaatggttagtgttttttttgggtgtgagaatttgggaggggattgttttaggtttttaggtttttgttaatattaattttgggtttagatagtgttttagggggtagcgggttttgttttttcggttattgaggatatgtagtttgtagggtttaggttcgtttagggtttgggaaatgttgggggtaaggatggaaggtggtagtgggtgtgttgggtttttgagatatttgtaggttgtgtgggtgggaggagtttttgggatatttatattgggatagtttttgggaaatttttttaggtatcggttgtgggcgggggtattattacgtgtttatggatttgttttgggtttgaggaatagatattttgtgagtattgtttgaagttagtttagggtgtttgggattgggtttgaagttgggtggaggagggagggggaggagggattttggtagaagatagttttatagagttttgtttggagtagtaagtttagaagaatcgtataggcgtaatataaacgtgatggacgtttaggtttttagcgtttttcgggtacgtgtacgttgagtcggagtataaaggtttgagtagggggcggggtagggtaggggttgtgagtttaaggtggatattagagatggaggggtcgtagtttgtaggtgggaaggatttttttcgggtggttgtttttgaggggagttagttgtatttggcgggagaatgatatagagttttgtaggttggtatggtggtatttttggatatttatgggtggtagcgtttattataaggagggggtagagatagtttatttgtttgggagtggggttttaggttttttttaatttgggggtttggtttgtttggggttcgaggttttttaagattatttttttattttggagtgtagatgttagttagttaggggtttttttagtatagcgttaattatttgtgtttttttttatagt

SEQ ID NO: 2044 - DNA, 13503 bp, Artificial Sequence
  chemically treated genomic DNA (Homo sapiens)
gttgtgggagggaatataggtggttagcgttgtgttgggagggtttttgattagttggtatttatattttaaggtggggagatggttttaagaggtttcgggttttagataagttaggtttttaaattggaggggatttaggattttatttttaggtagatgagttgtttttgttttttttttatggtggacgttgttatttatggatgtttaagggtattattatattagtttgtaaggttttgtgttattttttcgttaaatgtaattggttttttttaaaggtagttattcggggaggattttttttatttgtaagttgcggtttttttatttttggtgtttattttgggtttatagtttttgttttgtttcgttttttgtttaggtttttatgtttcggtttagcgtgtacgtgttcgagaagcgttggaagtttgggcgtttattacgtttgtgttacgtttgtgcggtttttttaggtttgttattttagatagagttttatgggattgttttttgttagagtttttttttttttttttttttttatttaattttaagtttagttttaggtattttgggttggttttaggtagtgtttatagaatatttgttttttaaatttagaataaatttatgaatacgtgatgatgttttcgtttatagtcggtgtttgggggggttttttaggagttgttttagtatgagtgttttaggagttttttttatttatatagtttgtaagtattttagggatttagtatatttattgttattttttatttttgtttttagtattttttaggttttggacgggtttggattttgtagattgtatgtttttagtggtcggaaggataggattcgttgttttttggaatattgtttgaatttagaattggtgttgatagaggtttggaggtttgaggtagtttttttttaggtttttatatttaggaggaatattggttatttttggttagggagttttcggagattattattattatattagtaaatttgaagaacgaagtttttatggtatcgttttatgtttggagatgaaggttggagatgaggttgtgtttgtttcggattggttttttttagttagcgtgggttgggggttagcggtatagtttttagtatgttcgtatttttcgtgttagtatgtattttggggatttgttattaggattacggagaataaaatgttttagttacgagttaaattgtgtttttttaattttatattttgaagtttttatttttagtattttagaatgggattttatttggagataaagttgttgtagatgtaattagttaagatgaggttttattttatgaagacgggttttaatttagtgttgttatgtttttataaaagaggagatttggagatagggagggtgttatgagaatatgagggtagagattagggtgatgataagttaggaatattagaagtagtcggtaagttttagaagttggagggtttggataggtgttttttatggtttaggagtagttatttttgttattattttgattttagatttttggtttttagaattacgagatagtatatttttgtttgcggtgtttttttatggtagtttagggtattgagattttttttggttaagcgttttgttgatagtataggtattattggtagttttgtcgttagggtagatttagttttaggttttatttgcgtttttattttaggtttgaggatttttgggaaatatttaggtatttcgggtagttagtaggagggagttggggattgattattatagttttgttttcggaggtgagaggggttacgttcgtgttatggttaggagtagaggtagagagaaggttaagttgtttcgattttagcgtttgtcgggatttaatagtattcgtggcgtcgtttttagaattttagtacgattaattagcgttgtggaaataattgtagcgttttttttagtatagttcggttgggttttttagttttgatatagaggtttggggttttttgtttaagttagtaatatttatcgtgtttattttatttttttatttcgtcgtattttggttttatttttatatttttttttgttttatttattttttcgttttattcggttgtatttaggtcgggtttttcgtataggtttggttttatttttatatttttttttgttttatttattttttcgttttatttcgttgtatttaggtcgggtttttcgtataggtttggtttttatttttatatttttattagtttttgttttttgttttatttttgtttagttttaggtgttaattttgtttagatgaagttttgatgttatattttatatgggttatgagttttatgaggtgggggttttttgggatagggtatagatggtgtttaaggaatgttaggtaggtgggggatagagggtagtataggtgagtgggcgggagtggggtttagttgtagttgtaaatggtttttgggagaattttttaggtttgtttgttttgggtttttattttttttaggtttgtgttgtggttgggatttttattttattttggttttgtttatatttttattttaggttttgtattggggttgggatttttattttattttgtcggtaattttatttttaggttatgtattgtgtttgggagttttattttattttggttttgtattttttttatattttgtgttgtggttgggaattattttttgttattatagatgggttttaagttttagagaggggaggttttttttttcggttatacgacgtatagttagattagaagttagggttttcgtaatattttttagttttgaggttcgttaggtttgtggagataggtagttttttttttagtagtttgttttttatagagattttttcgattttgttggagaaagggttttttttgttagggtttggaattttttttttgtgtaggtttgaggagggaggagggagaaataggtttttttagggtttgttgggttgggttttttagttagtttttttaggtttttatttttttttattttaggttttggttaggtttttagagttgggtttttttaaggtcggcgaggtgtttagtattaggtagtttttttaggattttgtatgggtttgtaaaggattggatatcgagacgatagagatagcggggggagggttggggtgaggagtggggggagttggaagaagggggacgggaaaggaatggaatatagtcgtttttttagagttttagtttttttgcggttttgagtattaggtgtgagggtcgagttgagttggttttttttaacggagtttgttgtgggtcgagcgtgtttttagatttatatgtaatgttttgatttttaattagttggtatttggaaatggggttttgtgaagtgatgaggatgagacgaagttacgaagttagggattttatggtgggatgagtggttttaaaggaggggaagggattcgagttttttgggttaggtaaggatatagtaggaaggtagtagttgtaggttgggaagatagtttttttacgatttagatttgtgggtattttgattggattttcgtttttagattgcggagaagggaatatatgttgtttaagacgtttattttgtagcgtatttggattttcgagtttggtttttagaataggggggggatatttttgttatttgaagttatttagtatgtagttttttgtaatagtagttttagggattatacgggtgttattgttgttcgtgtagaggggtttgtttaggttttcgattgttcgggattgggggagtttatagcggaggttgggggtttgggtcgtatttattttgggtttagatttttatttgtgggtaagggtagagatgagaggttatttaaattttgggttttttttgtatggttagaagagtgtagatatgattggggattttagggagtatttagtattattttttattattgtataggtggggaaattgaggtttaaagggatgttttttagttagtgttatatagcgagtaagttatgagtatagttaggttttttattttaggaatttattttaggggtcgtatatggttgagggttcgcgtttttagttagtttttagtatttgtagaatggttgggtaggtttagggtttttacgtttttcggtttttagggtagagaatgtgaggagagaggaggaggacggaagtatttatatttaatttttgtttttaggttaatttatattagttttgttaggtcggatcgaagtgtatttaatggatagtttagttggtttataaaattgttaggtttggtgtgtttaaatgaagaggattatttatgtaggtgatgattacgggataatagttaaatttatttttaaatgtttttaatttttgcgttatagcggagttataaggtacgttttagagagtggggtttttttttatgttttgagattttaggaatagttagtagttttatcggataggtagggtaggttggttaggttatttttttacgatattttttgaggggtttcgtatagttttcgttatttttcgaggggtttggtatattagttagggtagttatttttaattttattgatttgagttgtagttgagaagttattagggacggtggtttttgtgagtgtttttggtaggtggatatttattcgtatttttttatgttttgtttgtagtgtttttttggggtttgtttgggggtaggttagttttttggaatattttggttttttaatttttaggagaaaagtttatgatttttttttttcgttaggtttttttgcgttaggtttaggggatattttttttttttgagtttttttagttttttatttagatttttgatatagtttttagtatttttttttaaaattattattggtttgttttttttaaaatgaaaatagtttttttagagattttttttgattatttatttttcggttatttttttttttttttcgtattttgttgttttttatgtacgtgtatatttagtgtatataggatttgtagtgagtgtttatttgttttttatttatatacggttttatttttgggtttcgtgttgatttttgtttttttttttataatatcgtgtggtatttttttatagttgtaaatataaatttttaggagtatttaggttcgttgtcgggatagatttaatatttttttagtagtttttagttggcgggtattttgggcggttgtttcgggtttggtaaaatagtattaaggtgaacgttttaaacgtatatttttgattatttgttggataattttcgttgtattttacgtaagtagtttggtgaggtcggttttatacgttttatatttattattaggtcgtttttagtaagcggtttgggtgtttgtttttgttatttttataatttgttttttgtttgtcggtaatttggggttttggtttttttggtgcgttttcggttatagtgggtaggatattgattttatgtgttgtttgggttttgtggttttttagtttttcgaggatgaaagtgataatgtttgaaatattttaggtgttttggaggaaatgttttggtaggttttttatttttattttgagtttacggttttttttttttttttggttttagaattttgttgtaattttatagatatttaatttagtttggtgattttcggaagatcggtattttagaagaggttggtgttttgtatatgtttatttttgagaaggggaggtttttttaggatttattagttgtttaaaaaaagtgtaggggtttttgtattttttttttgattttttgggtttgtttagatttttgtttagagtttattggggagtagaggttgttggtatataggcgaaattttagaattttaatgtttttagggttagacgggatttaggtatttgaagtagggtgtttcgttttaggttttaattttattggttaaaggaaacgtggttgtttatagatatggtttcggtttttggtttttaagtcgtggggtaaagttttggtttagtttttgttttttaggttagaggagagggtagagtgaagtaggtaaaaattattggggtatgaggtttcgggtttaggtttgtattgttgtttttgaattggtagttttttgggtttgggtcggcgtagttttagttagattattttttattagttgggtagtgttgttagtgtcgaggttttggtaacgttggtttatttttaggttgtattttttcgtttttggattttatgaggggaaatgtataatggggaggtcgtttatttagtgtttttggaggttgagttagggggtaggtcggaggttgtaagggtgttattcgtttattttggtcgttatttttgggatatatattttaattcgtttatttgtttaattttgttatttagggtttggtttgaggttgggttatttttaaggtttaggggtaggagggttttatttttgaggttttgtttttttatttattttgtttttggtggtttttagttgttcgacgggtttggtttttgttattgtgttaattatggagttttttatgattttatatgtaagattgaggtggtaattgtgttgtcggtatttagtgggggatggaaggggatttatagggttttttttgatgttttgggttattttataatgatatagtaaagtttgttggagcgtggaataggcgttttttgtttatttcgggttatagtgtttattagaggttacggtttttattcggagtcgaaggttatatttagagttatggttcgtatttgaggttatattttttatttgaggttatatttttagatttatagttttgcgtagtttgaggttttttttttaaaggtaagggttttgttatttgagtatttttttcgattataaaaggttagggttgtagttagttaatgtagcgagcgttgttggaaaagtattggtttttttgggtaggataatcggtaggtgtattgtgtttatttacgggtttcggtaaggttagggtttcggttacggaggttatttatttacgaacgtatttttgttagtttttttttaaatttttttaattttttatagtgtattttgggattattttttaaataaatttttggtgtttaaatttttatttttgggtttgtttttaggaattaaatagataaaataatttattatgaagaatagttaggatgtaattttgaagtatattggggttttatagtcgtagtagtttttatattttggagtttagtagggtttttttagtttgtttattgtattatgattagttatagagttttacgggtttttggaaggattatttttgggttagatagagggttcgagtagagtttttatttttataggacgtgatagagtttagaatatttttagtgatatttgaatttttagtttttgagtaggtttcggagattaaatttagggaggaagtttttatgggatttgagtgtttttttttcgggacgtttttttttttatttggtagataatagatgagggtatgtcggatgggtgtacggtatttgtgaatgggaaggttgttattgtttatattttgaagattaggtggttgtttatgttattatttagtgtagttgatattatttgattttgtgacggtagtagtagttgtagttgtattagaggttttagtataaattgtttcgttgagtttagttagttatagaattgagagatgataattggtttttgttttaagatattgatacggtttggatatgtggggaaatatatgggtgtttttataagaaagttaaatttagtggtgggtgtttttataaaaaagttatatgaaagtagagatatagatatatagaggagaaggttacgtgacgacggaggtagagattagagtaacgttgttgtaagttaaggtggttggtaattattagatttcggagaaggtaggaaaggttttttttaggagtttagagagagtgaggttttgttggtattttgattttggatttttggtttttatagttgtaagcgtaaatttttatttttataagtttattatcgttggtggtagtttgttatagtagttttaggatatttatacgttatatagataaggaggtgtttttgcggttagggttaggttgattgttgagtttggtttataggtataggattatggtttttagtaatttatggtcgatttcgatgttgtgtaggttgatatttattggtggtgtttttagatatttgaatgatgtatttggagttacggtttatttttcgggaattgaaggggcggattcgtatcgttatttttatcgaagtttcggttatttttgtggttttcgtgggttatttttcgtagtagtgggagttttagtgtggggggaatattttggaaaaaagggaaatatgaattagaaataatatttgaggaggtaggataggtatttcggttgtagttgaagttataggttttttttatttttttttaaagtttttagtgtgatatatgtatggggtggaatttataaggagaggaggtagcgtagataattttagaaagtaggagtttagcgggattagtggaatttagtttcgtaagtttgaggaagttgaaatttaataaaagaaatagaaatatagcgatttgggtgtgaacgtgaaggtggtttttatatttacggtaaattttttaggaagggtttttttttgtggatgtaggcgttggtgggttttatgttaggttcgcgtaggttttaagagttagtgttggttttagatcgatatgttaaggacgttttaaaatagaatagtgttttagaatgttttattatattttttatattaagcgttagttggtagttatattagtagtagtgtggtttttgaattagtaagaaagaattttatttagaaatgaaaagaatagtatagatagttttaagtaatgggataaaagttaacgttttcggtttaatgttttgttggtaatttacgtagaaggtggagaggaatatttttgagttttattgaggagaagtaggagataagttatggggaattcggtataagttagggttgggggattagtttcggtttggtttttattttagttgtgtgatagttttttgggttttagtttatcgtttgtgaaatgacggggtggtggttaggaattttaaaatgatttggtttttcgggtattgggattttgaggaaggttgatgaaaatttttcgtaaaatagtgacgaagtagttattgtgaaaggttttttcgggttgattagttagatgttgttgttttttcgtgggatttgcggtttgaacgatggggtttttgggtatagggatagggatagtttcgggatagagttgttggttataggaatggttagaattttatgaaatagaatttatgtagtttgatacgagaggttttcgttaattgttgtttaaatgttttagggtgtttatttagtggtgagttttatattattagaggtatttaagtagagtaaaggttgggaggtttttttgaaatttttttatattgatattttatgaagaggtaattttttgtttggtcgtttttatttgtaagtgttatttttgggggaatttggtaaaaagtttttattttatagtgttttagttttatagttgtgaagaagggataagtttttttgggttgtttttggaagttttaggattaagagtaggaagggtttgtttgtagaaggaaagggggtatagtaagtttgggtttgtttgtagaaggaaagggggtatagcgagtttgggataggattaagagtaggaagggtttgtttgtagaaggaaagggggtatagtgagtttgggattagggtagacgttgaatttttggattttgtttaggttatttttaggttttttagaattttttcgtagaataggttggatgtggggtagggttgttttttaggtaaatagtttttttagaggttataggggagggggatgtgttaggttattttatggttaagtggggataagtttttgatgtggttggattcgtgtcgtttatattatagttttttagagttattaggtgtagtcgcgtttatattttagagtgttttcgttattatttttttttatagttaggagtggttgttagcgtggacggggggatgatttttgagaatttgtgtttttttgtgttgaaaatttttgtatttttaaaattggaaaaagttttaggacgttttagtcgggatggagagaggaataggtaagtttattagtttttggttagagtataaatttcgtaaggtttttagggagtaattttgtagtacgttttgggtttttaagaaggtttgtattttttgatttagtaattttaagtattaaaatcggaaatatttagaaattaagaaaatattgatgaaagtagatattttatttaatagtgtaaaatttttagttttttttaaatttagttatataaatttagtgtaatttcgataagtaaaatattttaataggatgtttaatggaatttggtaggataagagaattttgaaaaatgagaataaagagaggaaatattttttattagttattatatattttatagagttataatgatttttaaagtttagaaatgatacgtgaatagattaagtatgtttaaagtagatatatatatatatatatatatatatatatatatatatatattaaagaaaaaggtagtaatttagggaatgaggtaagattagtatgggataattggttttttcgtattgaaaaaataaagttattttagaatttgatttttaaaatgtaaaagtggtataaggatatagagaagtttttgtttttggttttggggtatggaatatgtatattacgaagtatggaaggcgaaggcggtttggtgggtgtagtggttagtagtcgattaatgtattatttaagaggttcgatattacgtcgtattgtgtgtgaaggaattagtgtgtagttataagttaatattttagaggaggggttgttaagacgggagttggttttcgtagtatagttttcggggtgtatttgtattttgcgtacggggtaagagattgggaatttggagtttttttagatagagagtcgttgttgagggacggaggaagttgtagagtttttgggtaaaaagaaatttgagaggttaagattttagaagatagaggtgaataattaagatgaataaatgtttagttttttttttaagatatttgttaaattttgaggatatgagaggtgagattttaaaaatttaagttgaaaattaaagaggagttttgtatagttttaggtgggaaggaataaagatttgagtttagggtttttcgggaggagaatatttagtgattatattaggttttggttgaaagtttagtaaggtacgaaatttaagagtagggtagagttatagttcggacgaattttatgaaaattataatttgttttcgtttggtttaattcggattttagtttggttgtttgggagagaaaatggaagttatttggaatttttatatttttttatttttatttttatttttttaaatttaggataatttttgtattttatatttttttaataggtaatgtgtgatatttaattaaaatttagaaggtataaaataagaaaggattttgattaaaaataaagaggaaaaataaaatataaatatatgagaaaaaaaaagatatatatttaaatatgatttagatttaggagttattaaataaggattttagaataattttgataaatatatttaaaataagagtaaaaaggatagagaatataaatggaaaatggagaatttttttagaggattggaaattataaaaaaaaaaattaaatggaaatgttagatttggaaaataaaatatttaaaattaggaatttaagagatagatatagttgaagatagtgttagtaaattggaggataggtaatagaaatatagaaaatttaaaatagataaaaagaataggaaatatagatatgatagttagaaaagtataggatatagtgaaatggttaaatatatttgtaagtggaatttagaaggagaagaaatggaatgggggtgttatggtttgaatgtttgtgttttttgtttttatttaaatttttatgttgaaattttaattttttaagtgatgattttagtaagtggggtttttataaggtgattaggttatgagggtggggttttataaatgggattatgtttttatgaaagaaatgttagagatattttttagtttttttattacgtgagagtagggtaagaaggcgtttaggagttagaaagtagatttttagttaatgtgttttatttttgagttttttagtttttagaattgtgaaaaataaatttttttatttataagttattttgtttgtgatatttttgttgtattagttggaatggattaaaataggggagaagtagtatttataaaattaatgattatggattggtttaaagttgtttgaagtatattgatttataggtttaagaagttttataaatataaagtaagataaataagaaagttatataaggtatagtattgtaatattgttaggattaaggatgaagagaaaaagtttaaagttagttagaaaaaaaaaaaaaaaaagtatgtaatttttaaaggagtaaaaataagattgataattgattttttaatagaaatgatagaaattaaaagataagattgtaagattttaatatgattatgaaagaggtaatagtaattatttatattcgattgttaaggatatatgttgttattgttagggtaattatttagaaagtagaaaattaatgtataattaataagttaatagaaaaatatttaaaaaattaaaatttattgtatgaatttaatagaaggtagtgaaggagaaaaatagaatatgaaaatataattgttaagtggaaaagaaagagttaagattgtagataaaaggttaatttagtatgaattaaatatattaagtaaaatattaaaaattgttagattagatttttataaattatattttgtttataagagattttatatataaagatatagagaggttgaaaataaaaggatgaaaatttgtgtttgttttattagttattgaggaggagaaaatatatatcgtatatattattttgtttatttagtttgagatcgggttttttgtttttgagattagagtttagtggtatgattttagtttattatagtttttattttttaggtttaagtaatttttttgttttagttttttgaggagttgggattatgggtatatgttattatatttggttaaattttttattttgta

SEQ ID NO: 2045 - DNA, 40862 bp, Artificial Sequence
  chemically treated genomic DNA (Homo sapiens)
atatcgagtattttttataataattaggatttatttttatttagataatgttgttttagttaatttttttgtggtttttggagatgtaggtttattttttaaattttttttttttttttttttttttttgagatagttttttgttttgttttttaggttggagtgtagtggtatgattatagtttattgtagttttgattttttgggtttaagtaatttttttattttagttgtttgagtattagggattataggtgtgtgttattgtatttagttaatgtttttattttttgtaaagataggattttattatgtggttaagtttggttttgaatttttgggtttatataatttttttgttttagttttttaaaatgttgggattataggtgtgagatgtattagaaatttttaaattttttaaaaattttttaagtttttttggttttataggaaagtaggagtttggattttagtttgattataggaaataagtagattgttatttatttaataaaaaatatttatgataaatattttttaggttatttatttatttaataggtttttattatatatttattgttgttaaatgttttggggttagaggtgaattatgttagtttggaaattaggtggaatattattatttaaatggatatttttgtattttaaaataaattttgtagtttatataatttggaatattgtatgtttgttttttatggaaatgatgaagtttattggttatggtatttttgggttatgggatttatatttattttgtttttattttttttttatttttatatgtattttatcgatatttatgtttaatttagaagattggtagtatataagattttaaatattattattggtttagaatttgagttaatgaatggagagattatgttatatttgaaataaatttttttaataataaaaattaagagtataagtttttttattttattttagttttattaaatattttatgtttaaaatgttagtaagtgtgaaagaggttatggaattttgtgagtgataaaatatttgtagagtatttggggatttggatttgggtgttattaaaattaattaaatataagtagtttatatgagttttttaatttttatttttgtttttaatttttaattttttagtattgttaaaatatggaattaggtagatttatagtaattttggtagatgtttgttaggaattgatttcgtataatatttttggtaataaaattatagttttttaaatttgatatttagtatgttttttattttataagaagaaaaatatttttgttgttttgttggagtaggttagtttataaaaataaagtgatgtatttttatatgtttttaacgtgtttaattttgttaggtatggtggtttatgtttttaattttaagtatattggtaggtcgaggtaagaggattttttgagtttaggagtttaagattgtagtgtgttatgatggtattattgtattttagttttagtgatagagattttgttttttaagttagtaagtaaataaataaaatgtttaatttaaaataaaattataattttttttttagtagttaggtgaaattttttaattattaatttttggtattttaaataatattaaaatagtttttaaaagaagatattaattaattgaggaaagattttaaaataattttttttaagttttaatttttaaatttttaaagaattatatatttttgtattatttaggtttataaaaatgtagttattaaatttgatattaaaaataagatatcgtatattttttgtggaataaagtatagtataaagaaaattagaatgttatgattatttttttttaattttttttatttgtaatattttttttaagcggaaaagtttgataaattttttttttttgtacgtgattattttttgtattagatgtatttaattttgtaggttaaatatttaggataaaaggagagtagaaagaatttttagagttttgatttttatggaagtaataagttgaaatttggaaataatatgttttattgttattaattttattgtagttagttaatattttagggatttttttgattttttttataataattttatatttttatagtgtttataatttgtaatttgtgtttatttattttatgagatttttgtaaaaattttttgaaagaaggttagtgtgtatgtatatgtgggtgtatgaatatatatatatatgtgtatatgtttgtttatatatatatatatgtgtgtgtatgatatatatatgtatatagttattttttattgtttataggggatcggttttagaatttttttagatattaaaatttttagatgtttaagttttttatataaaatgattaattggttaattttttttggtaaagttgattttgattttattagttttttttttggtttagtaataggaataatgatttttataatttaggggattaaaagtaaaattttagtttaagttattttaggaataaattatggagttataaattttttggaggagttatagatttagtgttaatgttagagtattgtagtatattaatataatagatagttttgaaaagttgttttagaaaaatgttttagttaaagtgatttaatattaaattttgtatagttattttttattttgtaaatgtatatgttaatattaaagtatttatattgtgtaattttttattttaggtgtttttgtttttaatataatgttgttttaaggtcgaatatgtatagtaataattgttataaattgattacgagagattataattattgtataaattataggttatgttattgtgtagataaaaattattgattatgtatgttagaggtggattataaatagtaatttttaagattagaaatttatttgatatttttatgggtttatttttaaaagtgatttcgttgaataaaagtttaatattttttaaaagaaaggtaaatttaaaaatcgtttagaattttcgattttagtttagtattatttatttgggaataaatatagaagtataggtaatttcgttcgttaatttggtttcgttattgtgtagataaaaattattgattatgtatgttagaggtggattatagttaattcgttaagattagaaatttatttgatagtgatttttatgggtttatttttaaaagtgatttcgttgaataaaagtttaatattttttaaaagaaaggtaaatttagaaagttgtttagaatttttaattttagtttagtattatttatttgggaataaatatagaaatataggtaatttcgttcgttaattttgatgttgaacgtgtggttagagagtatattgcgatatgttataggatttgagataaaaagtaaatttgtaaagtgtttaagtgttgatggagaaaaatatatttagtatatacggaaatttttttttgagttttttgtaggatgattattaatttagtaggtgaagttttgttttttagtggttatgggtgtgagaggatttttgtttaatattatatgtttggtttattacggtttattaaaattaatcgtttattaaaaagtatttattaggggtttgggtaagatgtcgagtaagtgaaatgtttacgtgtgaaaaggtattgatattggataaaggtatagttgttaaaagaagtgttcgtttattggtttcgatagttgtacgattggtttttaattgttgttttagtttttttttagttttatatattataaacgaatgaaaaagattagttttttttggagttttttgaggttgaattttgtttttttattatatatggtaattaagtatattttttatagaattttgggaagtcgtttcgcgattatcggttttcgtaagaattaagtagttagtgtagggttttgtaagtgagagtgcgagattcgggaggttgtttacggtgttttagtttttggtaggagtatggatatttcgtttttttttttcgtgggttttaacgttgtttgttgagattgtgattgttatttcgacgggagtagttttttttatagattttgtagagagcgtttaaacgtttcggggatagcggttatgattgttagtttgggtcgatttcgcggtcgttttacgggaatgcgtggtcgatacggggcgtgggcgaattttcgattttcgcgtttagggggtatatataaacgggcggatatcgtttttggggtaagggaggcgttagtaagaataaggcgggttattaatttcgagcgattttttatcggacggatttaaatttaaatattgtttatttcgggtcgaagtttcggtttttattttattttcgtttttttagttcgtgaatacgaatgcgtttgcgcgtattttttttagcggaagtaatagtgataaagttgggttcgcggttggtttaggagtgcggggcgcgattgggcggtcggcggcggggaggggcggagcgtaggagtcggaggcgggagtagattagtacggtttcgcggagtcggttcggcggatcgtgacgggtttttttatttttttttttttttttttttcgttcgttttttttttttttttttttttttttcgttcgtttttttttacgtcgggagtaggttcgcgtttcgtatcgttgtttcgcgagtagttttttttttttcgaggcgcgcggggcgttttcgcgagtttcgcggttgagatttcgtagtttggaggagggttgttcggggttttgggtgggtattagtattattttttgtttttatttttagaaatttttaggttttgaaggaaggggaggttcgggtattttttggatgggggggtatttttagggcgtcgtttcgttggcgtgagttggggacgttgcgggtatacgacggggcgggtgcgggattttggggaggggggttttcgagatagtggttgggcggggaattttttttttagtttttcgttagcgtcgttttttttggttttttttgtagatgttgttgttaggggtggtgggagtagtcgtgggacgcgtggtcgggagcgggggtgatagtttgggatttcgggggttttttttttttgtttttttttttttttttttatttttagtgtggtcgtggttgatattaaagattttgtagttattaattcgagtgtagtttcgatggaaaatgaaggtaaaggtttttggtcgatcggttgtaacgcggagttgagggtgtggtggtttgtttttaagttgtttttgtttttttatttttttattttcgtgagtttatttatttattgtgtatgtgaagtgtttaaggatttgtttatttagggtatttagtttttattttggtaatatggggtatttgagagattgaggttttgtgggtgattgagtttgatttagtttttttgaggaatttttgttttttttagtttagggaatgagagggaagtttttattttagatagcgtttgtgtatgtttaaatagttatttgaaaggaattattcgaggggaagtggaaatgggggataaggggatggggttgtatttttgtatattggcgttttaagtttcgatgtggtgtgtggtaggatttatttataagaaagtaagttatgttttattatgtttagtattggggaaaaaatttattattttttaatttataaaaaaaatttagtgaatttaatgaaatgttatgagatgagtgttttttttaaagttttattttattttaaaatattatttaggaggttgatagcggaatttgtttgtttattgtatattttggatatattagatcgttatttatatgttatatgatttttttggtttcgttaaaatatttaatgttttttttatatagtattgattatttttaaaattgttgaataattgtgaataagtgatttttttttttttttttgaaataatatttattttttggattgatttttgatttgtgcgtgattattttttttttttttgtttttaatcgggttgtaaaatattataaaagatatttaataaatgatagtttttttttttggtataatttgttttaaaaaatatgtgtttggtataaaggagttgtagttttgttggttgtttttaatttgtttttttattgttgagaatgtaagtttgattgtttgattaggattagtaattttgaaatgggtgttttttatagatgtagtaatgtgttttgttatttgagatttttgggttatgtagggaatatgatgagaggtatgattatattgataaattttattttggatggataattggcggaagatattttttgaaatattaaagtgtataattgtagaggagttatattgtttaattgggttttgagaaatatttgaaagtagtgatgtttttggtgataaggaaagttatttttttgagtttttttttttttttttaagtttattgatttaagaaaggtaaatttattttgtatatgagataaagaatgttaaatgtatttatatatttgttttttggtagaaatattttaaataatttttaatatttaatgtatgtttatgagtttgtttttagaatggtattagatttaagagggtagtttaaagtaggtggatttttttatgttgtttttgttttttgattttttaggaggaagagtatgagtaataaagtcgatttttattatttattgaggtgggagggggtggttgtgagataggagaatggtgtttatttgtgtttgtttttgtattttgtggttaaatatgaattttgtggttttatagtaaaagattatatagtttttaaaaacgtgtggggttttttgtttcgttatttttgattattaagagattatttttgttagtttttttttatcgttatatttttttttatatataaatagtttgaagaagagtttgtatatagtttagaaatttttaaaagtgattgattatattaaattatatagattgatatttgtgtttttttattgtttatttgtttttttgtagtttttatttttttttgatatagtgtagtattaataatttggaggtgtgaaataaaaatggatttaagttttgattaatttgttttgaattatttaaagttgtgtgattttaagtaaattacgttatttttttgagtttgtatttttttatttataaattgggattgataatttttaatttatagaattgagaggattaaatgagaaattttgtataaatttttttgtgaggtaggaatgataacgtttaagagtttgagttgtggtggaattatgtagattgatttgaatgttggattcgtcgtttattatttggttttgtgtatattaaagttttttgtgttttcgtttttttataaaataaagataatgatagaatttattttatgaggttgttgtaaatatttaaatagtatttggtatatagtaagtgttcggtaaatgttaattataaattgtttagttgaatgtttgatatatattaataggttatttggtattaatattgttatgatagttaaatgttggaagggggaatagtagtagttaaatgtttaaaatgaagttgttattgttagttgagggataagtggagttaggtaaggaattttttatggtattagtgtttttaagtttatagaaaaagttagggttttattaagaagttagggtttagtatagaaagagataggtttggatttgaagttcgataagtaatgttttttttttttgaaaaatttgataagttattaggtttttaagtttttttagtttttaagttattttatttgtaaatgagataatgtttttttgtaaagttgatgtgagtaataaatgaagtcgttagagtaatgtttgatatatagttaatttggatgaattgagtgatgttgttgttttttagtaagagtattttttagtaggtatgtaggtagttatatttgtgggtgtgaatagtgtagaattgatagtgtttttttagagtattagtatgaaggttttttaggtagtttatagtggtgtggggaggaaatggttttatttatgtgttggtttttttagtaatggtggtattttttttggtatttcggtttagatttttttggattttttttttagggtttatttaaatttttttagtaaagtttgattaatttttagttgtagattttaggatgttttatgaatattttttgtttgttattaggaacgtttaaaatgttaattttttggaatttttggattatttaatatttagtcgtgagttaggattttatttagattttttggaatttgtttttatatgtttattataaatttaaatagatttcgtttaggtattttgagatgtataagtaaatagtttttatttgatttttaaaagttaattgtatgtttaaagtgatagtttattagaaaagatatgtttagttggagaagtttgtatataggtttttttttttagtaatggatttattttttggaataaatttggttttttttatagaaaatttagtgtgattttaatatatatgaaattttaatatagttttaaatgtttgattagtggatagaaatgtaatagtttttaggattttaggatatggttaatttaagattatagatagagttaataggtgtagagaataatgttttaattttttttgtttgaaaatggttgtatttatattttatttttaaaagtagttttttaatttaattttaaattgttaattagttaggaatgttttaagaaaaaattgtattattatagttggagaagttatagggaaaaagggatgagaagttattttaattttatttttttaattgaaaataggaaattaggttataaaaatatatttttgggtgtgggaaatatagtttatgttgtttgtagttttgtttataaaatgatagttttaattagtattttgaaaaagagttgaaattaaaagagattatatatatgatattttgtaaattgtagtaatttaagttagaggatgttgtagagagtatttgtatgtaataattttttgatagttggattttaaatatttgatttgtttttatatttttgttatttatttaaagttagtagaatttaggtttgttaacgtaaagtattatgaaataaaatagttttttagggaatatatttttaggggtttaggattgattttggagattttagttagttatgatttgttttgtaaggttaaattttgttttaaaggtgttaggaatattgtggtttgatggtaaagttagtatgaattttaaattatatcgttgttatatgtagtattttaaaatattttaaggattagtttaagaggtttttttatatttattttgttgaaataaattttttttaataatggttttaggtattagttgtgataaggttatttttatgttttttatgtagataaatgttggtaaaaggtagtaaagggtgtattttgaggttaatgttattattttatgaaagaaaggattttttaaaaaaaaggttaaattgataatttttttttggatgtatatgattgttatttatatgtatttgttaatatagttgatttttgaataatgtgggggttggggtgttgatttattatgtagttgaaaatttgtatgtaatttttaattttttgaaaattaaattattaatagtttttattgttgtttggaagttttattgataatataaatagttaattaatatatattttgtatgttatatgtattatatattgtatttttgtaataaagtagagaaaaaaatttattaagaaaattatgaggaggagaaaatatatttataatttattaagtagaagtggattattataaaggtttttatttttattgttttcgttttgagtaggttgaagaaaaggaggggttggttttgttgtttcgggtgatagaagtaaatttgagtataagtagatttttatagttgaaatttatgttgttaaagagttaattgtgtattttttgtttttaggttttaagttgttacgataaaagtataaatcgtagaattataaataaattatattaattgtgttaaattaggttggtttagattaaatttgtgatgtgtttagaaaaagtttgaatgaaatgttgaaaagttgttttagattatagatagaagatagtaatagtcggggttagaagtattattttaagatggtcgtaattgggtgtttgatttaatttttatttttgttttttttaattttgttataggtattagagaatgtgtgaattggaattatttaatatatttgttagttgtaattgtttttttaagtaaaggttttttggtttgatatttggttatttcgtaaatatgttgatttaaattcgtgttttttttttagaaggaaatacgttaatttagtatgatatttttttttttttttttgtgtttatttatttatttatttttttgagatggagttttattttgtaatttaggttgggttgggatatagtagtattattatagtttattaaagtttttaatttttggattaatgcgatttttttgttttagttttttgagtagttgggattataagtatatattattatatttagttaattttttaatttttttaaagacgaggttttgatatattgtttatgttggttttgaatttttggatttaagtagttttattgttttggttttttaaattgttggaattataggtatgagttatcgtgtttagttttagtatgatattttttatttttttagaaagttttgagatattgatgtatttttatagaaattatttttatttatttatttatttatttaaaatagtttgataaagttggaaaaagtaggattttaaataataaatatatttgttattagttttttataggaaaatttagaaataataagtggaaatatttaggatgttatttattagattttttttttgaatatgtaaatgtgtttttttgaaaatttaaatacgtaaagtaaaaattaaaagttttggttaagttgtgaattttagaaatttattttggttatggtgttttgaagttaaaaagaatagagtattagtatattagtatataaacgttttgttattttttgtttaagggtaagatttaattttgaattaggttttggatttttttttattttaaatcggagttttttttatttgtagtataaataaattagttttttgatgttgtgattttatttgtatatgttatatatgagatttatatttttttttgtatgtaggtattttattagattttgtttggttatttatttttagtgtttttttagtagtatgtttgttttatttgtttttatttaggtttttatattattaggggtggaaatattagttggtttaattaagtttgggagttgtattttatttgttttgttgagtgttagttttatttttttttgaagtaggtaaaagtagtttatggtataaatgttagaaatagtatgtaaattattttgtagtggtatgtaaattaatttttgttgtgttttttttttaatgtttgtgagggttattgtttatttaagagttaatatttggtttatgaaattagtattagatgagaaattttagtatttttttttattttagagaaagatgtggttattggggattgttttgaagtttgttagttttttattttaaaagttggtagattagttattatattttgatatgtatttttaatttatatgaggggttaagagagattagttatttttgattttatttgttagaagataaagggagtgtggtttgtatttatattagagtaatgggaatgaagggtagggatggatgatagagatattttatttttaggaaaaattagtaggatttggatagtgattagatatagagaattaagggaatagttgaattagatatgattgtaagatgttatttgggttagtgaaggtgttattgattgtggttgaaggagtgagtcgatttaggggttggttgaagggaatatataggttagattgttatgatgtgaggtttatatagttatgtatggagagaggtgttaaattaagtattaggatttaaagtgagtttttgaaggtagagattttaatttgttttttatttattttgaatagattttgggacgtatttattgttaattgaatgaaaatgttggttttttttttttaagtggtttttattttaggattgttttgttttcgggggatatttggtaatgtttagagaaatgttgggttgttataatttaaagtatgttattggtatttagtgtgtagagattagggatgttggtaagtatgttataattcgtaagatagtattttttattttttttcgttatttttaaaattttttagttttagatgttaatggtgttaagattgagaaatattgttttaataaacggtaaggaagttgatttttttaagttttggtttttttatttgtaaagagattatgattattttaggtttgttagaattagattaggtagggtgtgtataagtgtttggtatgaaagagttttttagtaaattttaattttttttattttatttgatgaatagatttaggggagttatttttggttttttaattgttaattttaaggttttacgttttttttttttttttttttttttttgagaggtgagtgggatgtttaggaaatatagagtagtttttataattttaatgttttttttatggttttattaaattatgattttgattatattttggtttgggtttgtattattttaggatttagtatttagtgtttatttagtagtagataatgaagttaaatttttagtgtagattaatgaagttaagtttttaaattttattttttagtttgtaaatatattttatgtattatttattgtttatagaattgttattgtttggaagtaattttattattttttgaaattaagattaaaatgtattgaattttattttttatggaaaatgttagattttttatgtttattgttttttttttttttatttatttattttaattagatttttttcgaagttagaatttttttttagattttttttttagggtttttattaggtggtttttttttgtttgtcgggtgtttttttattttattttgtaaggtgttgaatattttttttattttgtaaggtgttgaatgttttagtggtgttagggataggattatcgatatttttatttttaatattaattttttagtgatttattttagttatagttttagtgtttaaagtttttttatatgtatatagttgtgtggtatttttatttttagggagttattggaattttttgttgttatttttttttttttaggaaaaaaatcggtttatttttattatatattattttttttatttatagaatggaattattgtaggtaaaagtttttgagttcggtaaattatgtattggatttattaatgtacgttttattaattgtaggtggaatttagaaataatttgtttgttttttattttaaattaagattatttaaatattttatttattaattagttggttagaaaaattagtttttgaggaatattatttaaatatggaaaataataatagagtatattttgtgatagtaaataaattatcggttaatttaattttataggatttaaagttggtagttttaaatgatattaaattgtatttgattgttaattgtttttaaaggtttacgtggttttttattgtatttgtagttatttaggtttggaagtatagggtgttaagaatgttattataatgtttttttataagggtttggtttgttatagtttgtaaaattaggtttattagttagttgttttatgaaatgaatgttattggttatggtgggggaggtattaggagaaggtataaaggaatttaaaaaaatttttttttttttttttttttttttttttttttttttttgtttttttttttttttttttttttttttttttttttttttttttttttattttttttttttttttttttttttttttttttttttttttttttattttttgtattgttagtaaaataattgttgtttattgaaggttttaaaaaatattggttgtatgtttaatataggatggtaataaaatggacgggtttaaaaaatatgtagatggtatgatattttttttttttatttttgtattaaattttttttaaatttagaataatttatataaatagatgtattagtagatggagtattatgtttattttttaatttaatgattaaaaaatgttaaattttttttagagtggtagtataatttagatgtagttaattgttggatgtaaatttaattatggtagaaagatttattttattttgagaggtttttttaaaattttttaaaattatgttgatttttaaaatttgaaataattttagatttatataaaaggtataaaaatagtataaagaggttttggatattttttgtttagttatttttaatgttaatattttatataattatagtataattattaaaattaggatatttatatttataaattattttttttttagtttaggatttaatttgggattttattttgtatttagttattattatgttagtttttttttatttgttaagttttttagtttttttttttttttattttttataaatgttattgatatttttgaagagtattgttagttattttttagaatgttttttaatatggggttgttagatttttattcgtgattagtatgttttatgatgggtgaagttaatgtgattatttggttaaggttgtgtttgttagatttttttattgtaaagttattgtttttttttttgtaataataaatgtttattttaattttgtagttgtataataattagtaatttttttgtaattaatatttttttttagtggggaggtattgtaaatatattgtgttttattatatttattatgggttagttttgtaatattttgtgttttattatattttatatgggtaagttttgttatttattaatggtttttaattggtagtagttattattgttttggtttttgtttaatggcgagttttttattttatttatttttattatatttggaattttataattaaggaagtattgttttttttatttattaattatttaattaatttatttatatggttttgtggatattttgttttatgggttaaaatttagtaattgttgtttaagttattttcgttttggttattgagggtatttgaaaatttgtttttgtgttttttttataatatttttttttattttgtgagtattaatttattttttggtattatatgatgttttgggtgtattttgtattttttttgtttgtattagttatggaattaattatttttttagggagttgagtttattttattagagaatgatatttagaaattaagatttgggtgttaggtgtgttttatgttattgggtgttattgtttttaggtttttttagtagatagagttagtagtgtatatgtttggtaatatgtatgaatatatatgtttttatttttttatttatttatttatgtatataaataaaaaattgttagtgatgttgttagttttgtttttttattatagggtttattttggtttttttttttgtttagtttttttttttttttttgttatttttttttttaaaggtgagaaattgtttttaattatagtatattgatttatttgttttattcgagtatatataaataaaagtagttttagaattagtgatttatttattttttggtgagaaatatagttttaaattagagtataatatttgtttttaattttatggtatataggtaaattttgtttttagaagttatttgggttttttttatttttgtttaagggttatgttagttatttgtaataaaattaggtttatttgttattgtttgtatgttgttttaagttttttttatattttgttttattatagtatagtattttttttttatttatttatgataaagatgtgtttttaaaaggattggatttgtttaaggttgggtatagttgtaattgttttgttagatagtagttaaaggatatgtgttttggtaattatttttttgggtttgtttgtttggttttttagttttagtttttatttttatatcgtttatatttgggaattgatattagttgtggttttataattgttagtgtttgaaattatgtttatcgattaaattttatttgttttgtatgtatagttttagattcggagttatttatagtatgaatattaatttttttatagttgtggtaaattatgaagtattttgtagattttgttttttattgggttttttttttttaagatagaattatttattataaaatttgttattttaaagtgtataatttagtggtttttagtatagttataaaattgtatattgatataattttagaatatttttattattttagaaagaaattttttatttattagtagttattttttatttttttttttcgttagtttttggtaattattaatttattttgtttttatggatttgtttgttttgggtattttatataaattgaattatataatatgtgattttttatgtttggtttttagtacgtgttagtattttatttttttttgcgatgaaataatattttattgtatggatatatatattttgtttatttattagtttttattttttgttaaaaaataatattattgtgagtatttatgtatgggtttttgtgtaaatatgtttttagtttttttaggtgtatatttaggagtagaagtgttgggttatggtaattttatttttaatttattgagtaattgttatagtggttgaattatttttttatttttattagtagtgtatgaggtttttttttaattaatttttttatattttttttaatattttgttgttttttttttttttttttattgtattttagggggtatgaagtggttttatattgtagttttgatttgcgttttttaaatgattaatgatgtgttaaggattttttgtatggattttttatgtaaaagaatgaaggtggatttttattttatagtatatgtaaaaattatttttgtattttgatttttaatttgttggtttataagtttttgtagatttaagtattataatgttttggttattgtagattttgcgataagttagttttgtaattaggaagtgtgatgtgtttattggttatttgtatatttttggagaaatgtttatttaaattttttgattattttgtaatttggttatttatttttttgttgagttgtaagagttttttatatatatgtgtgtatatatatatatatatatatatatacgtttattttggatattggataggaatatattttatatttgtattagtatataaagatgtttatttaagagtgtttattgtagtaatgtttataagataattattagagatatggtttgtaaatattttttttattttgtggattatttgtttattttttgaatggtattttttatattagaaatttttaaaattgtgatgaagtttaatttatatatgtgttttttttattgtttgtgttttatatatttaggaaattattgtttgatttaatgtgatgaagattataagaattttatagtttaatttttacgtttgatttattttgagtttatttttgtatatgatgtgatataagggtttatttttatttttttgtatagaatatttagttattttaatattgtttgttaaaaagattattttttttttattgaatgttttggtatttttgttaaaaattaattgattagaaattatgggtttatttttagattttgaattttattttgttggtttatatgtttttgttgatgtaagtattataatgttttgattattgtaggttttgtagtaagttaattttgaaattggaagtgtgagatttttaatagtgtttgtttttttttttttttttttttagattgttttgtttattttggattttttgtatttttatatgaattttagaattagtttgtttatttttgttaaaaaggtagttggaatttttataagtattgttttgaattgttttttattttgagaatataatatttttatttaggtataaatataagattttttgagtattatgtttgggtgtgattttattttaggtaataagtattttatagaaatagaaggttaaaaggtatatgaaaagatgtttaattttagttatgaagaaatgtaaattaaaaataaaattataattttttatttgttagattggtaaagattagagtgtagtgatgattagttttggttagattgtggggaaaatagaagtttttgagtttgaagtttttgatatagtttttttggagattagtagtagtagttattagaataaaaaatatgaataattaaagttttatttttagaaatgtattttgtatttgtatttgtataaatatattaagaagtttgtataggatgtttattgtagtaatatttgtaatattaaaagataggagttagtttaaatattattaagaggattagttaaaattgaagtattgtatataatgaaatgttttgtgagttattgaaaagaatgaggtaggttagtatgtaaggtgatatggagtttaagatgtattgaatgataaaatttgttattgtgtggttttattagaaattaaaaaaaaaaaatattagaaatatttgtatatatatttgtatagaaaatggttggtagtatatatagaaatagttaatagagattatttttgggtagtagaattggaaattttattaaatttttttttattatttgattttttttaaaataatgagtaggtttttgttttttgaaaaattattaagaatgatttagtagtgtaagtaaaattaaaattaatattattttttaggaataaaatatttgtttttttttgttagtttgattgttttatatataatatttgttggtttttagagtagtttgattgttttgtatataatttttgttggtatttagaggtaaatgtattttattgtgatttttattgttgtgtggaaaatggattagaattagtttttgggtataaatatttaatagtatttggaattatattttttatttttatatattgtaagtatgggagaaaaataagatttattttttaagagttgtgattgtgttagtttttaatttattaaatgaagaatatttaagaatatttaattttttaagtataaagaatatttaagaatatttaagagtattgaagtttgattatgttattgttttttgggtttatgttttggaatttaaggtttagtgaagaaggtaattattttatagtattttttttaataaaggttattgatatatttttagaaattttagtattataggtagtaaggaggtagtgagatttttttggattttgttagattatttttagaatttttaaggtgaggggattaattttttattttatatagaaatggtattaatattttttttagaaattttttggtgattggaaattttttatttgttgatgttggttttgtttttagggagaatgttatgttttatgtaatatattttaaaatatttgaagatatttgttatattttttatttagaaatttttattgaaatttaattaatggttaggtattgttttttatatttttttaggtcgaatatttttaattttttttattgattattttaagattttatttttagaaatgttattatagtatgttatgtttggtagtaggttttaatgatgttttaaattgaatatagattttttaaggtatggttggattgttgtgaaatagtttaggtttattgattcgtttggattaaaaagttattttttttataatgtagtttaggataatgtttatttttttagtaataggtttatattgagaatgtttttatagttttttaaatgatgtatgaggttaatttaatttatgtgtttgtttgaattattattgtagagttttagtatttggtatgttagtagttggtttttcggtatagtagtaggttttatatatatatttatatttatatttatttattgttaatagagttagggttttattatgttgtttaggttggttttgaatttttgggtgtaagtgattttgttgttttggttttttaaagtgttgcgattacgggtatgagttacggtatttagttagtagtaggtttttatatttattttttataagtatacgtgtatgtttttgtaaatgttgaggtggtggtatattgttttttttcgttgattttgtttgataattagtttgttagaattttgttttggtttgtagttttttttgaagaggttttttatattttttgtaagttggatttttaggtattttattttttttgaagtaattgtgaatgggagtttatttatgatttggttttttgtttgtttgtttttggtgtataagaatgtttgtgatttttgtatattgattttgtattttgagattttgttgaagttgtttattagtttaaggagattttgggttgagataatggggttttttagatatataattatgtcgtttgtaaatagggataatttgattttttttttttttaattgaatattttttattttttttttttgtttaattgttttggttagaatttttaatattttgttgaataggagtggtgagagagggtatttttgttttgtgttagtttttaaagggaatgtttttagtttttgtttatttagtatgatattggttgtgagtttgttatagatagtttttattattttgaaatacgttttattaatatttaatttattgagagtttttagtatgaagggttgttgaattttgttaaaggttttttttgtatttattgagataattatgtggtttttgtttttggttttgtttatatgttggattatatttattgatttgcgtatattgaattagttttgtattttagggatgaagtttatttgattatggtggataagttttttgatgtgttgttggattcgttttgttagtattttattgaggatttttgtattaatgtttattaaggatattggtttaaaatttttttttttggttgtgtttttgttcggttttggtattagaatgatgttggttttataaaatgagttagggaggattttttttttttttattgattggaatagttttagaaggaatggtagtagtttttttttgtatttttgatagaatttggttgtgaatttatttggttttggattttttttggttggtaaattattgattattgttataattttagtttttgttattggtttatttagagatttaatttttttttggtttagttttgggagagtgtatgtgttgaggaatttatttattttttttagattttttagtttatttgcgtagaggtgtttgtagtattttttgatggtagtttgtatttttgtgggatcggtagtgatattttttttattattttttattgtgtttatttgatttttttttttttttttttttattagttttgttagtggtttattaattttgttgatttttttaaaaaattagtttttggatttattgatttttttgaagggttttttgtgtttttattttttttagttttgttttgattttagttattttttgttttttgttagtttttgaatgtgtttgtttttgtttttttagtttttttaattgtgatgttagggtgttaattttggattttttttgtttttttttgtgggtatttagtgttataaattgaggatataaataaatggaagaatattttatgtttatgggtaggaagaattaatattgtgaaaatggttatattgtttaaggtaatttatagatttagtgttatttttattaagttatcgatgattttttttatagaattggaaaaaattattttaaagtttatatggaattaaaaaagagttcgtatcgttaagttaattttaagttaaaagaataaagttggaggtattatattatttgattttaaattatattataaggttatagtaattaaaatagtatggtattggtattataatagagatatagattaatggaatagaatagagtttttagaaataacgtcgtatatttataattatttgatttttgataaatttgagaaaaataagtaatggggaaaggattttttatttaataaatggtgttgggaaaattggttagttatatgtagaaagttgaaattggattttttttttatattttatataaaaattaatttaagatggattaaagatttaaacgttagatttaaaattataaaaattttagaagaaaatttaggtattattatttaggatataggtatgggtaaggattttatgtttaaaatattaaaagtaatggtaataaaagataaaattgataaatgggatttaattaaattaaagagtttttgtatagtaaaagaaattattattagagtgaataggaaatttataaaatgggagaaaattttcgtaatttatttatttgataaagggtaaatatttagaatttataatgaatttaaattaatttataagaaaaaaataaataattttattaaaaagtgggcgaaagatatgaatagatattttttaaaagaagatatttatgtagttaaaaaatatatgaaaaaatgtttattattattggttattagagaaatgtaaattaaaattataatgagatattattttatattagttagaatggtaattattaaaaagttaggaaataataggtgttggagaggatgtggagaaataggaatatttttatattgttggtgggattgtaaattagtttaattattgtggaagttagtgtggcgattttttagggatttagaattagaaatattatttgatttagttattttattattgggtatatatttaaatgattataaattatgttgttataaagatatatgtatatgtatgtttattgcggtattatttataatagtaaaaatttggaattaatttaaatatttaataatgatagattggattaagaaaatgtggtatatatatattatggagtattatgtagttataaaaaatgatgagtttatgttttttgtagggatatggatgaaattggaaattattatttttagtaaattatcgtaagaataaaaaattaaatattatatatttttatttataggtgggaattgaataatgagattatatggatataggaaggggaatattatattttggggattgttgtggggtggggggagggatagtattgggagatatatttaatgttagatgacgagttagtgggtgtagtatattagtatggtatatgtatatatatgtaattaatttgtataatgtgtatatgtattttaaaatttaaagtataataaaaaataaataaatttaaaaaaaaaaaagaattttgttttggttatgaggtaaggtgggtatttttttttagttttgagttaatgttattttggataagtatgttatttagtatttatttgagttgttgataaaatattaatagaatagagtttcgtggtatatttagtggtattgagttattaatattattggtttatttgttagaaattatgtagtttagttgtgtatttttatgtgatagtgtttataaaatgttttgttggtattagaagattgtatagttttattgtatttaagatatgttgtttttaaatgattgttttttttttttttaaagttaaaatttgttgtatttatttaagatttttttggtgtgtgtatgggggaagaggggaggtggaaggatgaaaagattttttgtattaagtttgtttttggttaaaaagaagtttgtatttttagattttaaatttagttttattatattaaaattagttttttaaattggatttattttgaaatttttggatgatttgattaatttaaatattgtataatagttaagaaggaggatttttagtgttatataatggttcggtttttggttatattatttattagttttgttaatttttttttgtgttgggtatattatttttttaatttttaatttttttatttaaaaaagtagtaaaaataatgttttttttagattgtttttcgaggattaagtgaagtattagaaataaagtatttagtattaagtattggtatttagtagtttaacgggtaaatttgttttttttttttttttttttttttttagtatttttttttttattatgttttttttaattgttattgtgataatatataaatgattaaatgtgaaattagtagagttttagattttttttttaatttaaagttttaaattaaaaatagtgtattttttgtagattttttaaggataaatagttgattttttaaaatgaaagtgttttgtgaaagttttatagttaaatatttttgttttttagtttaaggtttaagttatataggtttttttgtttgttttttttttgatttgttttaattagttaagtgtattttagtgagaagggagaaagagtagaaaggtgttggatttgtaattgattgtgaataattagttgagataatttaattgtttttagattagttaagttttatagttttataagaaaaaatttatttaggttagtaatttatgttgaattatttttggttattttgtgtttaataatattattttggggtgtttttgttttttttggggggtaaggaaatggggttttggtattttgtttagtttgggtttgaatttttgattttttgttttagttttttaagtagagggtgtttttgattatattttaataaaaggattggaagttgaagtaaggaattaaaaatataaatgtgaattattgatagatgttaggtaagtagttgtgtaggtgggattaatttgtttgattaagattttgattgtttattttttttacgttttatttttttattttataatatattttgaatatgaaaatatggggaatatagattttaatagaagaagtttaattatttgtgaataagtatgagaattatttggatattttgtagttgttataatatagagtaaatagagtattagtatttacgggaaagtagttggattgttgaattttttttgatttgtttgttgttttggatgataggagggtttttttttattttttagtaaagattgggaaagaaaagagttaattgtgaatttattgggattaatttattttgggtttttttttttttttttttttgagacgatgttttattttgttgtttaggttggagtgtaatggcgtgattttggtttattgtaattttcgttttttgggtttaagcgatttttttgttttagttttttaagtagttaggattaaaggcgtttgttattacgtttagttaatttttgtatttgtagtagagatagggttttattatgttggttaggttggtttcgaatttttgattttaagtgatttattcgttttagatttttaaaatgttggaattataggtatgagttattgcgttcggtttaatttatttttaattataagaatgtatagtttttgtttagggatatagtgttagttgaaaaattagggaaaaagtttgttatttagtttagttttttatttatttttttatttagtagttattgagtattagttatatgttaggtatagtgagtgttggtttgtgtgatttgtagtttttgtagttattgagtttatagtgtagttgagggaaaaatacgtttggatgagtagtgatagttacgtggtaggggattgagtgtgagtaatcggtttagggttgtcgtaagttaatataaaaaagtttatagaaggaatgaggtttaaaagtttagtgtagggtatggagtgtgtaggttggatttggtttttgtttgtagaaatgtgttataagtattttagataaagggatttagtggtagattttttttatatatgttattttagtagtgtggttttagattttatatttagttatttatatttagtttgaggcgttttgagttagtttaaatttattgttattaaataaatgggttatgtattttaataatagaggattagttatttttatatgtgaagggtagtattattgggatatgtaaagtaaatttatttgtgataatagaatatttaagtatagttaataaataggatttttatagttttttattaggtaatattttttttagagatttttatggagtatgagtatttaaagtgaggtggaggttaggtatagtggtttacgtttgtaattttagtattttgggaggttgaggtgggtggattgtttgagtttaggagtttgagattagtttgggtaatacggtgaaattttgtttttatttaaaaaaaaaaaaaaataaaaaattagttaggtatggttgtatgtgtttgtaattttagttatttgggaggttgagatagaagaattgttttaatttgggaggtagaggttgtagtgagtagagatcgcgttattgtattttagtttgggtaatagaataagattttattttaaaaaataaaaataaataaaaaaataaagtgaggtcgaaattatgatttttttggaggacgggtttaaaaggtgattgattagtagggttaaagattaaatttgtgtttaaatttatatatatatttttttttttttttttttttttttttaaagttattatgtattgttgtagtattaattttttttgttttagcggggaaatagttggtattattgtaggtagaatttaagttttttgattaatgaagtggaggattgtttgaatttttaatgttttatttttatgtgtaatttgattttttagtttttttttttttttttttatttagttattcgatagtttaatttttttttttttttttttatttagtttttagttttttatttttttattgtttaaaaattatataaatggtgtttttttgtttattttttttatttatgttgaggattggtttttttaaatatagtttttgtaaattaatgtgtattgattgattttatttttttgattatatttttaaagtagttaaggttattggttattataaatgaagtatatataagttcgtgatttgtgatggtttgatttaggattttttaattttacgatggtgtgaaagtagtagatatttagtagaaattgtatttttgttttttatttttagtatagtattatttattaaatatatgagatagttaatattttataaaataggttttgtattagattattttgtttaattgtaggttaatgtaagtgttgttgagtgtgtttaaaataggttatgttaagttatgatgttcgtttcggtaggttaggtgtatgaaatgtatttttgatttgttatttttaatttatgatggatttgttggtatattattttattgtagttgaggagaatagtggattttatgaagataaatttaattattaggtaaaagatattttttttttttaaaagtagattaataatatgtgaacgtttttggatttgttttatttaagtaagattttagattttgttgtgttatagatggtttgtaattgtgtttaatatataatagttgggaatgagtgttagagtattatttttgaattttgtttatatggtagtgtgtgttaaaaattaagatgtaaaatttttgtttttattttatttcgatatttaaaaatattagtaaaatttgggattaggtgaaaatttttttgttttatttgtaaaaatatttttttaaaaatattgtggtaaagagatttagttttttaatgaattttaaagtatatattattgttggttataggtataatgttgtatagtagttttttagtgtttatttattttgattgattgaaattttatgagttttgattagttattttttattttttttttttttagtttttgttaattattattttattttttgatttttatgaatttgtattattttagatagtggagttatgtagttatttgtttttttgtgattggtttattttatttagtatggtgtttttaagatttatttatgttgtgttattttgtagaatttttttttttttttaagttgaagttttatttaaattgtaaaagaaatggtttttaaaaaatgttggcgaataaagtaaaaggataagatatagtgttttttttttacgagttagttagtttattcgagtatagggtaatatatagtatttaatgttggtagaattttgtagtagtttagaaagattatttgtgtttagattatgaagagatttttagtgtgtgatgtttggttttgggtttatattttattgggtatgaataagagttttttttttggttatagttaaattttttgggtttaaagttttttgtatagtattttttataatagattttatttttttttttagttaggagttgttgatttaagattttttttatattttgtatatcggaaatagtttttgttttagggttttttagttttagttatttttttagtagtatgtacggaatttttatatttggaatattttttagtatttttgtatttttgagtaaatttagaagtttttggatttgtttgtaggtatgtgaggttgaatattttggtttgatgtttaggtttttattacggtttatgttaagtatgttagcgttttggttataaattgtagttttttggtttatatttttttttatagtaggatttgtagtaaattttttaattatgaattgttattgttttgttatttaaattatttttgtaaattatgtatagaaagtagtagtagtgggtcgggcgcggtggtttacgtttgtaattttagtattttgggaggtcgaggcgggcggattatgaggttaggagatcgagattattttggttaatatggtgaaattcggtttttattaaaaatataaaaaaattagttaggtatggtggcgggtgtttgtagttttagttattcgggaggttgaggtaggagaatggcgtgaattcgggaggcggagtttatcgtgagtttagatcgcgttattgtattttagtttgggtaatagagtaagatttcgttttaaataaataaataaataaataaaaagtagtagcggtggaagtttttgttattatattgtattttttttgcgtggtgtacggttttttcgtagattttatatttgtttttatttttttacgtaggtattttgagttggaggtaggagtacgtattataggcggagttagagaggttgggttggagggagtgtttagggagttcgagatcgttagaattttagaattttttttttttttttttttttttttattgagagagttttgtttttttcgtcgaggttagagtgtaatggcgcgattttagtttattataatttttgttttttaggtttaagcgatttttttgttttagtttttcgagtagttgggattatagacgtttattattatatttagttaatttttatagtagagaaggggttttattatgttaattaggttgttgtcgaattttttattgtaggtgattcgtttgttttagttttttaaagtgttaggattataggtatgagttattacgttcggtttagagttttttttttaaggttatatagtattttattgtatatatattttatattttaaaaatttttttatttgttggtggatattaggtttttgtagttattattattatattgtgaatagtgttgtggtgaatatcggagtggtaatattcgtttgagattttgattttatttttttggataaatattttaaagtgggatttttggaatatatggtagttttgtttttaaatttttgaggaagttttatatttttttttatagtggttgtattattttgtatttttattaataggattttaatttttttatatttttattaatagtagttgtgttttgttttgttttggttttttgataatagttttttttataggtgtgaggtaatattgtgttgtggttttgatttttatttttttaatggttaatgatgagtatttttttatgtgtttattgtttatttgtatatgtttggagaaatgtttgttgatgtttttagtatatttttaagttgagttatttgtgtttttttattgttgaattattggagttttttatatatttggagattagttttttgttagatgtttgtaaatatttttttttatttcgtaggttgttttttattttgttaattgttttttttgttgcgtagaagttttttagtttgatgtagttttatttgtttatttttgttttggttgtttatgtttttggtattaaatttttgagataatcgtcgatattagtgttatgaagttttttttgtatgtttttttttaagagttttagttttatgttttaggtttattaaattatttttagttgatttttgtgtatggtgtaagaaaagggtttagtttattttttttaggtttttatatgtagatatgaagtttttttgatgttatttttttttttattgtatatttttggtatttttgttgaagattagttgattatatgtgtgtggatttatttttaggttttttttttgtgtttttgtggttttatatgttcgtttttatgttaatattatattgtttagattatggtagttttgtaatattaatatattttgaaattaggaagtatgatgtttttagttttgtttttttataagattgatttggttatttatggttttttgtggttttatatgaattttagaatcgtttttttatttttataaaaaatattattggaattttgatagtgattgcgtagaatttatagattattttgagtaatattggtatttaaaaatattaagttttaataaaacgtgagtataggtgtttttgtttttttgtgtgttttgtttaattttatttattgttttttggtttttaataaataaatttgttattttatttaagtttatttttaggtagttaatttttttttattgtaaatgagattgtttttttaatgttttttttagatagttagtgtatggaaatattattgatttttatatgttgattttgtattttgttattttatttaatttgtttattttaatagttttttaaaaatggaattttgcgagtttttttttttttttttttttttttttttgagacggagtttcgtatagttttttaggttggagtgtaggggtatagttttgggttagtgtaatttttattttttaggtttaagtgatttttttgttttagttttcgaagtagttgggattataggtgtttgttattatatttgattaatttttgtatttttagtagagatggggttttattatgttggttaggttggttttaagtttttgattttaagtgattcgtttatttcggttttttaaagtgttgggattataggtatgggttattgtgtttggtttaaaagggataattttattattttttttttgatttggatgtattttttttattttattaagtatttaatttattgtttaattgttttggttaggatttttagtattatgttgaattgaagtagggagagtgggtatttttgttttgtttttgattttttaggaaaagtttttgttttttgttattgaatataatgttggttgtgggttttttatatatagtttttattatgttattttttttttattttttgtttgtagagagtttttataatgaaagggcgttgatttttgttagatgttttttttgtatttattgagatgattatgtgatttttatttttgattttgttaatgtggtatattaatatattttttatatgttgaattatttttgtattataagggttagtagatttttttggtatgaaatttatttgattatggtgtattatttttttgataggttgttagatttagttagttagtattttgttgggaagttttgtatttatatttattaaggatattggtttgtaattttttttttttgttatattttttttttgttttggtgttagggtgatattggttttatagaatgatttacggaggattttttttttatttttaggaatagttttagtaacggtagtattaaatttttttgaatgtttgaaataatttagttgtagatttatttggtattggattttttttttgttggtaatttttttatttttgttttagttttattatttgttattggtttgtttagagtttttgtatttttttgatttaatttaggagagttttatatttttaggaaattaattattttttttggattttttagtttgtgtatgtaaaagtgtttatagtagttttgaatgattttttttatttttgtgttattagttgtaatattttttgttttatttttaattgagtttatttggattttgttttttttttttttggttaatgttgttaatggtttattgattttgtttatttttttttaaagaattagttttttgttttatttattttttgtaattttttgttttaattttatttagttttgttttgatttttgttatttatttttttttgttgggtttaggtttggtttgtttttgttttttagttttttgaggtgtgattttagattgtttgtgtttttttagattttttgatgtaggtatttaatgttgtgatttttttttttagtattgtttttgttttgttttagaggttttgataagttgtgttattgttattttttagtttatagaattttaaaatttttattttggttttattattgatttgaagtcgttatttaagagaagattatttaatttttatgtatttatgtagttttgagggttttttttggagttaatttttagttttattttattgtggttagagaggatattttatataattttagtttttataaatttattgagttttgtttaatggcgtattatatggtttgttttggagaatgttttatttgttggtgaaaagaatgtatattttgtaattgttgggtagaatgttttgtaaatatttgttaagtttatttgttgtagggtatagttttaagtttattgttttttttttgattttttgttttggtgatttgtttagtgttgttagtggattattgaagtttttttattattattgtgttgttatttgttttattttttaggtatagtagtaattgttttataaatttgggagttttaatgttaggtgtatatatatttaggattgttatatttttttgttgtattagtttttttatcgttatataatatttttttttgtttttttttttttttttgttggagatagagttttgttttgttatttaggttggagtgtagtggtgcgattttggtatattgtaatttttgttttttaggtttaagtaatttttttgttttagtttttcgagtagttgggattataggtatatattattatgtttggttaattttttgtatttttagtagaaacgagtttttattatgttggtttcgaatttttgtttttatgatttatttgtgttagttttttaaagtgttggggttataggcgtgagttattatatttggttttttttgtttttttttaattgttgttgttttgaagtttagtttgtttgatataagaataattatttttaggtcggaagtggtggtttatatttgtaattttagtattttgggaggtataggtgggtggattgtttgaggttaggagtttaagattagttttgtaaatatggtgaaattatgtttttattaaaatataaaaattagttaggtgtggtggtttacgtttgtaattttagttatttgggaggttgaggtgggagaatagttgaatttaggaggtgaaggttgtagggagtttagattgtatattgttttttaatttgggtgatgaagtgagattttgttttaaaaaaaaaaaaaaaaaaaggataattatttttgtttgtttttggtttttatttttatggaatatttttttttatttttttattttatgtgagtttttttgtgttaggtgagttttttgatgatagtagatttttggttcgtggatttttatttatttttttattttgtattttttaagtggagtatttaggttatttatatttaacgtgagtatttagatgtgaggtattgttgtttttattatgttagttgttgttttaattttttagttttttgtttttgtttttttttttattgtattattgttatataggttttgtgagatatatgttttaaggaagttttattttggtgtattttgaggttttgttttaagatttagaatttgtggtgttggtttggtagtggtaaatttttttagtatttgtttgtttgataaagattttattttttttttatttatgaagtttagttttgttggatataaaatttttggttgataattgttttgttgaaggaggttaaatataggattttagttttttttagtttgtagggtttttgttgaaagatatattgttaatttgataggtttttttttataggttatttgatatttttgttttatagtttttaagatttttttttttattttgattttaggtaatgatgattatgtgtttgggttatttttttatgatgaattttttaggtatttttgagttttttgagatttggatgtttagatttttagtaagatcggggaagttttttttgattattttttgaaatatgttttttaaatttttaaatttttttttttttttaggaatattaattatttttagttttggatgtttaacgtagatttagtttttacggatgttttgtttatttttttttaaataatttttttttattttggtagattgggttaattcgaaagtattgttttttgtttttgaagtttttttttttgtttgtttgattttattgttgagattttttagtgcgtttggtatttttttaagtgtgtttttgatttttagaagttgtggttgttttttatttatgttatatattttattgaagaattttttttttatattttgtattatgtttttgatttttttaagttggattttagttttttttggtgttttttttgattagtttaataattgattttttaaattttttttttggtaatttagagagttcgtttttgttcggatttattgttggtgagttggtacgattttttggtggtgttaaagaattttgttttgttatattattagaattgtttttttggtttttttttatttgggtagattatgttagagggaagatttgggatttaagggttgttttttagatttttttgttttatggggtttttttttgatgtggtgttttttttttttttttaggaatggggttttttgagtgttaaattgtagtgattgtttttgtttttttgggtttagttatttagtcgagttattaggtgttaggttagtattggcgagtgtttgtaaagagttttatgatgtgattcgtttttaggttttgtagttgtggatattagtatttgttttggtggaggtagttggggagtgaagtagattttgtgagggtttttggttgtgtttttgtttagtgtgttggttttgtgttggttgttttttagttgggagttggtatttttaagagtatattagttgtggtgttatagggaggatgtatatttgttttagagatatttggttaagtatttaggttttttaggtagtgagtaggtttatagagtttttaagagattatgatttttgtttttggttattaggatggttagagaaagattacgaggtgggggtaggaataggggtgttttagtttttttttgggtgagtttgttgtagttgttgttgcggggggtggggtgagggtgtggtttttagtttagtggagttatagttttagggggattgtggttgtttttgttgagttatataggttattagggaagtgggggaaagttggtagttatagattttattttgtttttatgtaatttgtggttttaaaggttggttttatttttattatgtttttttaatattattaagtttttttttaggtagtcggttattagggtggatattttgttttagattataagttttttttttgagaaagtaaatggatttatagtttttaggttttttagagaatttgtagtggtgatttaatttttttaaagggtttgtggatttttttggtttttttggtttgtttttgtggtagtttttgtattgtagtaaaagtttatgatgtgagtttttatatgttgttttgtttgttagaatgggagatataagttagttttgttttttatttattattttaatttgagtatttagatatagtttcgaataatgtgtatttatttataaagtttaggtatggaacgaggtaaataaaataaatataaaaattggatagtaaaattattttaatgaggagataaaggtttttaaaaagtatttgaattggaaagtttaggtgatattaaaatattaaataaaatagtatatttaagatttagtatgtgttaatatatgggataattagatcgttttaattgttttggttaatttttatttttataaatatgtagataaaattagtattgttgtatggtaataattattagtatattgttttgttttttaaaatgtgtttgttatattaggtttaaattattaaattaagtttttttattaaggttaggaatgttatatgtatgtagggatgagaattttattatatatatttacgtttatatattaggttttttagtttttgggcgttattttttaattttatgtgtattttatgtatgtgatttttatatgtgttttttcgttgtttttttattatgtgaaatatattaaatattttaatatatttgcgtttggttttggttgtttagtagtatttttgtgtgtaatgaaattagtgagtaagtatatatagtaggaattatattattttggtagaaaatagttatataaatacggatgtatatattttattggaaattttaaggatttatttttttagtttgtagtagaagtttgtttgttatattagatttttttattttttatttttatttttggattttaaagtagggttagtgtttttagttttgtatttggtgtttttaaaatgaatatggaaagtttataaatattatataagtattatgtgaatttggttgaaaataggtaaaataataaatttatatatattaattggtagttaaatttattttataagaaaattatttttaagattttttttttaattttttttttttttttgagatagagtttcgttttgtcgtttaggttggagtgtagtggcgtgattttagtttattgtaagttttgtttttcgggtttatgttatttttttgttttagttttttgagtagttgtgattatcggcgtttgttattatgtttggttaattttttgtattttttagtagagacggggttttattatgttagttaggatggtttcgattttttgattttgtgaatcgttcgttttagttttttaaagtgttgggattataggcgtgaattattatgttcggtttttttaattttttaaaatagagaaaatagtatattttttggggaaagatgaaggattgagaaaattagttttgggtaaaaattattatgattgtatttggagttgattaggtttgtttaggaaagaaataggtaattgttatatgattataggggatagttattatttgagttttagtagattagtttatacgttatgtaatgttgttgtatatttaaattgtaaaaattatttagtttattatgaaataagttgtatttattattagagattgttaggttattatttttatttgtagatagagtttaagtagtattttatttattttaaagatgatagatttttgttattgttgttaaaggggttgttgttttgtttttttagtgagtttttagagttggttttttttttgggttttgtatttgtttatgtttttattttttgtttttggttttttttattattattagggtaggtagatttggaataattttttttaaatgggtagtttttatgtttttcgttaaaatatttatatgttttattattttttatttttttgtatttttgaaatgagtttttgttattttttattttacgtagtatttatgtggaatgataaagttaaatatggtttggtattttgggatggattttattattttgtttttttgttgtttagtatttttttatttgtgaatatatttgaggtgtaggtgtggttgtagttggagagtattttaaagtagttttttatatatttagagagtattatgtttttttagtgttttattgtttattatatgaaataatatcgttttttattttggagatttatagttattttgagtttatggaatatttttaaagggttttatgtaaagtgtgtttaaatgtagattttatttatatattaattattaaaggattagttgagaaatattttatgagtaaggttgttatattgtatgttgggtattagagttagtaatttttaatatattattgatagaaaagtaaatattaataggaaattattatgaattgattttatttattttgtttagtttgtattgattttgttggaagaaaagtattaatagttgttatttgagtttttattagtggtaagttaaatgttgtgttagtgtatttaatttttaaatatttttgtttagttatattatttttaggttatatatatgaagaagatgaggtttggggattttagaaataagagattttattgatttgttattgtaggtagtgtaaatatatttgattttttttaattttgttttatgattttataagatgaaataattatgttatttattttaatttttattgttttaagatttaaattattttggggggaattttttttaatgttttatttaggaacggtttaatgaagttttttttttgttttagtttgttttatagatttgaaataagggtattttagtggttttaaaatatgtgtgtagtttttgtaaaatttttaattttttttttaagtttttatattttttgattatgtaaaaatattatgttataaaataattttagtaatttgtagtaaagaaaggtaatttgtttttagtttttttatatttatttatcgatatttttttattaaaagttgaaaaatattattgttttttgttttaaagtatttaaacgtttaattgtattttttatataaataagattagaaaatatgaatttgattgttttagaaatttagttatattgagagaagattttttttttttagtaatttattattttttggagtaaatgtaaaaagtttttatgtgtgtaggtttttgtaatgatattttaatgtagtagaattttttttgattttatttgtttaaagatattgttttaaaagttttagggaaatattttattttaaaaatgttaattatttaaggttgaaaagattttatttgatagtttaaaaatttgtatttgggtagtaagatgataattttagttttagtattattttaattgagtggatgtgtggtaatttaagtgttttcgttttttaagttttagtagtgggtagtttttgttttttttttgtttttatttaaagtattttgtttgtaaagaattttagtttaggatttaaaataagtttgtgttgaggatttatttttagagttgtgttaaatagttttttgtagttatagataattatttatgaagttgtattaagtacgtattttgattattattatttcgtgattaattgtttgtttatagttttttttattttttttattagtttttttttattaatttgtgtattttttgtttgtttggttttttttattttttgttttttttttagtttgtgaatagtttttaaagtttgatttgttgttatggtgcgttggaagagtagttagttgttttttttgggtagattagttatgagttgattgattaagaggagtagttaaaatggagaaagtttagttgtattttgttttgtatgttaaatataatgagtttagaggattatgattatttgtaattattaggatttgttagataggatatttgttttattttttatttttatgttggtggagaaatagcgtgttttttatttaatgtgaaaattttgtgttttagttgggtatcgatggtttagtttttgaaatgtaattttttgagaagtagtatgtggttagtataaaattgttttttttattaggattagttacgtaattagtttgaaatatttttttaattggaaaattagttgttgtgaatttttggatttttattattttagattgtattatatttgtttgttatatttaaatattttttttttggttttattttttagg

SEQ ID NO: 2046 - DNA, 40862 bp, Artificial Sequence
  chemically treated genomic DNA (Homo sapiens)
tttaggaagtaaaattaaagaaaaaatatttgaatatagtaaataagtgtaatgtagtttagaataataaaaatttaaaagtttatagtaattaattttttagttagaaaaatattttagattaattacgtagttagttttaataggaaagataattttatattaattatatgttattttttaagaaattatattttaaaaattaagttatcggtgtttagttagaatataaaatttttatattgaatgaaaagtacgttatttttttattaatataagagtaaaaagtaaaatagatgttttgtttagtagattttgatgattataaataattataattttttaaatttattatgtttaatatgtaagataaagtatagttaagttttttttattttaattattttttttagttagttagtttatagttgatttatttagaaaagataattggttatttttttaacgtattatgataataagttagattttaagagttatttataaattaggagaaaaataagaagtaaaagagattagataagtaaaggatgtataggttagtgaaggggagttggtgggaagggtggggaaggttgtgaataagtagttagttacgagatagtagtaattaaggtacgtatttgatgtagttttataagtaattatttatagttatagaaaattgtttaatataattttagaaataaatttttaatatagatttgttttgagttttaagttgagattttttatagataaaatgttttgagtgaaaatagaagggagataaaagttgtttattattgaaatttaagagacgaaaatatttgaattgttatatatttatttaattaaaataatattgaaattaaaattattattttattgtttagatataagtttttaagttgttaggtaagatttttttaattttggataattaatatttttaggataaaatatttttttaaaatttttaaagtagtatttttaagtaaatgaaattaaagaagattttattatattagagtgttattatagaggtttgtatatataaaggttttttgtatttattttaaaaaatagtaaattgttgaggaaaaaaagtttttttttagtatgattgagtttttggaataattaaatttatgttttttaattttatttatgtaaaaagtatagttggacgtttaaatattttaaaataaaaagtagtagtattttttaatttttaatgaggagatatcggtgaataaatatgaggaaattagagatagattatttttttttattgtaaattattgaaattattttatagtataatatttttatataattaagaaatgtaaaaatttagagaaaagattaggaattttataaaagttatatatatgttttagagttattgaaatgtttttattttaaatttataaaataaattaggataggggaaagattttattgaatcgtttttaagtaaaatattggagaagattttttttaaaatgatttaaattttaaaataatgagaattgaaatagatgatatagttattttattttgtgagattataaagtaaaattaagaagaattaaatatatttatattgtttgtagtgatagattaataaaattttttatttttaagatttttaaattttattttttttatatatataatttggggataatatggttaaatagagatgtttgaggattaaatatattaatatagtatttgatttattattagtaagagtttaaatgatagttattaatattttttttttaataaggttaatatagattaaataaggtgagtaaagttagtttatgataattttttattaatgtttatttttttattaataatatattggaaattgttaattttagtatttagtatgtaatatgatagttttatttataaaatgttttttaattaattttttggtagttggtatatagatagggtttatatttgaatatattttatataaaattttttgggggtattttatgggtttaaagtagttgtaaatttttagagtaggaaacggtattattttatataataaataataaaatattaaaggggtatgatattttttaaatatataaagggttgttttgagatgttttttagttgtaattatatttgtattttaagtgtgtttataagtggaggagtattaagtaatagaaaagtaagatggtaaagtttattttagaatgttaggttatatttaattttgttattttatatgagtattgcgtggagtagaaggtagtagaaatttattttaggaatataaggagatgaagagtgataaggtatgtaggtattttaacgaagaatatggaagttgtttatttggagagaattgttttaagtttgtttattttgatggtggtaaaaggagttagagatagaaaatgggaatataaatagatatagggtttaaggaaggaattaattttgggagtttattgaggaaatagaatagtaatttttttgataatagtgataagagtttgttatttttgagataggtgagatgttgtttaagttttgtttgtaggtggagatgatgatttgatagtttttgatgataaatgtagtttgttttatgataagttagatgatttttataatttgaatatatagtaatattgtatggcgtgtgaattagtttgttgagatttagatggtggttgttttttgtggttatatagtagttgtttgttttttttttaggtaggtttaattaattttagatgtagttataataatttttatttagagttggtttttttaattttttatttttttttaaggaatatattgttttttttattttaaaaagttaaaaaggtcgggtatggtggtttacgtttgtaattttagtattttgggaggttgaagcgggcggtttataaggttaggagatcgagattattttggttaatataatgaaatttcgtttttattaaaaaatataaaaaattagttaggtatggtggtaggcgtcggtagttatagttatttaggaagttgaggtaggagaatggtatgaattcgggaggtagagtttgtagtgagttgagattacgttattgtattttagtttgggcgatagagcgagattttgttttaaaaaaaaaaaaaaagttaaaaaaaaaattttaaagatggtttttttgtgaaataaatttaattattagttagtatatgtaggtttgttgttttatttgtttttaattagatttatatagtatttatatagtgtttatgaattttttatatttattttgaggatattagatataaaattaaaagtattggttttgttttggggtttaagaatagaggtgaagggtaaaaggatttgatgtggtaagtagatttttgttatagattgaagaggtgggtttttgagatttttagtgaaatatgtatattcgtgtttatatagttgttttttattaagatggtataatttttattatgtgtatttgtttattggttttattgtatataagaatattattgggtaattaaaattaggcgtaaatgtgttgagatgtttaatgtgttttatatgataggaaaatagcgaaagaatatatataaagattatatgtataaaatatatatggagttggaaggtgacgtttaagggttgagagatttggtatgtgagcgtgagtgtgtgtgataaggtttttatttttgtatatatgtgatatttttagttttagtagaaaaatttggtttaatagtttgagtttagtatggtagatatattttaaaggataaagtagtatattggtagttattattatatagtagtgttagttttgtttatatatttatagaaatgaggattagttagagtagttaaaacgatttggttattttatatattaatatatattgggttttggatatattattttatttaatgttttagtattatttaggttttttagtttaagtattttttgaaaatttttatttttttattggagtagttttgttatttagtttttgtgtttgttttatttgtttcgttttatgtttgaattttgtaggtagatatatattattcgaaattatatttagatgtttaaattaagatggtggataggaggtaggattagtttgtattttttattttgatagatagagtaatatgtggagatttatattatgaatttttgttataatataagaattattataggaataaattaggaaagttaagagaatttatagattttttgaagaaattggattattattgtaggttttttgggaggtttaaaaattatgagtttatttgtttttttaagggggaggtttgtggtttggggtaaagtatttattttggtaatcggttatttggaaaaagatttggtgatgttggggaggtatgatggaagtgagattagtttttaagattataggttgtatggaagtaaggtaaggtttgtgattgttagtttttttttatttttttggtggtttgtatgatttagtagaggtagttataatttttttgggattataattttattggattgggaattatatttttattttatttttcgtaatagtagttgtagtaagtttatttaaggagaggttgagatatttttatttttgtttttatttcgtagtttttttttagttattttggtagttaaagataaaggttataattttttgggagttttatgggtttgtttattgtttgagaaatttgaatatttgattaagtgtttttagggtaaatgtgtattttttttgtagtattatagttgatatgtttttgaaagtgttaatttttagttggaggataattaatataaaattagtatattaaataaaaatataattaaggatttttatagagtttattttattttttagttatttttattagagtaggtattagtatttatagttgtaagatttgaaaacggattatattataggattttttatagatattcgttagtattagtttggtatttggtagttcgattgggtggttagatttagaagagtaaaaataattattatagtttggtatttaggaagttttatttttaggggaaaggggagaatattatattaagggagaattttatgggataaaagaatttgaaaagtagtttttgaattttagattttttttttgatatagtttatttaaatgagaaggaattagaaaaataattttggtaatatgataaaataaggttttttaatattattaaaagatcgtattagtttattagtaatggattcgaataaagacgaattttttgaattgttagaaaaagaatttagaaggttaattattaagttaattaaaggaggtattagagaaagttgaagtttaatttaaagaaattaaaaatatgatataggatataaaaggaaaattttttagtgaaatatatagtataaataaaaaataattataatttttggaaattaaggatatatttagagaaatgttaaacgtattgggaagttttagtaatagaattaaataagtagaagaaagaattttagagatagaagataatgttttcgaattaatttaatttgttaagataaagaaaaattatttaaaaaaaaataaataaagtattcgtgaaggttgggtttacgttaaatatttaaagttaaaaataattggtgtttttgaggaagaaaagaaatttgaaagtttggaaaatatattttaggaaataattaaggaaaattttttcggttttgttagagatttagatatttaaattttaagaggtttaaaaatatttgggaaatttattataaaaagatggtttaggtatatagttattattatttaaagttaagatgaaggaaagaattttaagagttgtggggtaaaagtattaggtaatttataaagaaaaatttattagattaatagtgtattttttagtagaaattttataagttagaagggattggggttttatatttagttttttttaataaaataattattagttaagaattttgtatttagtaaaattaagttttataaatgaaggagagataaagtttttattagataaataaatgttgggagaatttgttattattaaattagtattataagttttaaattttgaaataaaattttaaaatatattaaaatggaatttttttaaagtatatattttatagggtttatataataatgatgtaatgaaaaaaaaaataaaaataaaaaattaagggattaaggtaataattagtatgatgaaaataatagtattttatatttaaatatttacgttgaatataaatggtttaaatattttatttaaaagatatagaatggaagaatggataaaaatttacgaattaaggatttgttgttattaagagatttatttaatatagaaggatttatataagataaagggatggaaaaagatattttatgaaaatggaaattaaaagtaagtaaaggtagttattttttttttttttttttttttgagatagagttttattttattatttaggttagagagtagtatgtaatttagattttttataatttttattttttgggtttagttatttttttattttagttttttaagtagttgggattataggcgtgagttattatatttggttaatttttgtattttagtagagatatggttttattatgtttgtaaggttagttttgaatttttgattttaagtaatttatttatttatgttttttaaagtgttaggattataggtgtgagttattattttcggtttagaagtagttatttttatattagataaattagattttaaagtaataatagttaaaaaaggataaaggaggttaggtgtggtggtttacgtttgtaattttagtattttggaaggttgatataggtggattataagggtaggagttcgagattagtatggtgaaaattcgtttttattaaaaatataaaaaattagttaggtatggtggtgtgtgtttgtaattttagttattcgggaggttgaggtaggagaattgtttgaatttgggaggtagaggttgtagtgtgttaaggtcgtattattatattttagtttgggtaatagagtaagattttgtttttaataaaaaaaaaaagaaagataaagagggatattatataacgataaaaggattagtataataggaaaatgtggtaattttaaatatatatgtatttaatattgaagtttttaaatttataaaataattattattatgtttaagaaatgagatagatggtaatataataatagtgagggaattttaataatttattgataatattagataggttattaagatagaaagttaagaaagaaataatggatttaagattatattttataataaatagatttaatagatatttatagaatattttatttaataattgtagaatatatattttttttattagtagatggaatattttttaagataggttatatgatacgttattaaataagatttaataaatttatgaaaattgaaattatatgaagtattttttttgattatagtggaataaaattggagattaattttaagaggaatttttaaaattatataaatatatagaaattaaataatttttttttgaatgacgattttaagttaataatgaaattaaaatggaaattttaaaattttatgaattgaggggtaatagtgatataatttattaaaatttttgagatagagtaaaagtagtgttaagaggaaaggttatagtattaaatgtttatattaaaaagtttgaaagagtatagataatttaaggttatattttaaggaattagagaataagaataaattaaatttaagtttagtagaagaaaataagtaataaagattagagtagaattaaatgaaattgaaataaaaaattataaaaaataaatgaaataaaaagttggttttttaaaaaaaaataaataaaattaatagattattagtaatattagttaagaaaagaagagataagatttaaataagtttaattagaaatgaaataggagatattataattgataatatagaaatagaaaagattatttaaggttattatgaatatttttatatgtataaattagaaaatttagaggagatggttaattttttagaaatataaaatttttttagattaaattaggaagatatagaaattttgagtagattaataataagtggtgagattgaaataggaatgaaaaaattgttaataaaaaaaaagtttagtattagatggatttatagttgaattattttagatatttaaagaaatttggtattatcgttattgaaattatttttaaagataaagagggaatttttcgtaaattattttatgaagttagtattattttaatattaaaataagggaagaatataataaaaaaagaaaattatagattaatatttttaataaatatagatgtaaaattttttaataaaatattagttaattgaatttaatagtttattaaaaaggtaatatattatgattaagtgggttttatattagggaaatttattgatttttgtgatgtaaggatgatttaatatataaaaaatgtattaatatattatattaatagaattaaagataaaaattatatgattattttaatagatgtagaaaaagtatttgataaaaattaacgtttttttattataaaaattttttataaataaggaataaaaagaaagtaatataataaagattgtatatgaaaagtttatagttaatattatatttaatagtaaaaaatagaaattttttttgaaagattaggaataaagtaaggatgtttattttttttattttagtttaatatagtattggaaattttagttaaagtaattaagtaataaattaaatgtttaataaaataaaaaaaatatatttaaattagaaaggaagtagtaaaattgttttttttgggttaggtatagtggtttatgtttataattttagtattttgggaagtcgaggtgggcggattatttgaggttaggagtttgagattagtttagttaatatggtgaaattttatttttattaaaaatataaaagttagttaggtgtggtggtaggtatttataattttagttatttcggaggttgagataggagaattatttgaatttgggaggtggaggttgtattgatttaagattgtgtttttgtattttagtttgggaaattgtgcgagatttcgttttaaaaaaaaaaaaaaaaaaaagaaagaaaattcgtaagattttatttttaaaaaattgttagaataaataaattgagtaaagtagtaggatataaaattaatatataaaaattagtaatgtttttatatattaattatttgaaaaggatattaggaaaataattttatttataatagaaaaaaattaattatttaggaataaatttgaatgaggtgataggtttgtttattgaaaattagaaaataatgaatgaaattaaataagatatataaaaaaatagaaatatttatgtttacgttttgttaagatttagtatttttaaatgttaatattatttaaagtgatttataaattttacgtaattattattaaaattttagtggtattttttatagaaatggaaaaacgattttaaaatttatatggaattataaaagattataaatagttaaattaattttgtaaaagaataaagttggaggtattatattttttgattttaaaatatattaatattataaagttattataatttaaatagtatggtattggtataaagacggatatatagagttataagaatatagaaagaaagtttagaaataagtttatatatatatggttaattgatttttaataaagatgttaagaatatataatgaggaaaggaatggtattaggaaaattttatatttatatgtaaaaatttaaaaaaaataaattgggttttttttttatattatatataaaaattaattgaaaatgatttaataaatttaagatatgaaattaaaatttttagaagaaaatatataggaaaagttttatgatattggtgtcggcgattattttaaggatttaatattaaaagtataagtaattaaaataaaaataaataagtgggattatattaaattaaaaagtttttacgtagtaaaagaaataattaatagagtaaaaggtaatttacggaatgagagaaaatatttgtaaatatttgataaggggttagtttttaaatatataaagaattttaataatttaatagtaaaaaaatataaataatttaatttaaaaatgtgttaaggatattaatagatatttttttaaatatatataaatgggtagtaagtatatgaaaagatgtttattattaattattagggaaatgaaaattaaaattataatataatattattttatatttgtaaggaaaattattattaaaaaattaaaataaaataaaatataattattgttggtgaggatgtgaagaaattggaattttgttggtgagaatgtaaaatggtgtagttattatggaaaaaagtatgaagtttttttaaaaatttaaaaatagaattattatatattttagaagttttattttggggtatttatttaaaagaatgaaattaggattttaaacggatattattatttcgatgtttattataatattatttataatgtgatagtgatagttgtagaaatttaatgtttattaatagatgaaaggatttttaaaatgtggaatatatgtataatggaatattatgtagttttaaaaaagaaattttaggtcgggcgtggtagtttatgtttgtaattttagtattttgggaggttgaggtaggcggattatttgtagtaaggagttcgataatagtttggttaatatggtaaaattttttttttattataaaaattagttgggtgtggtagtgggcgtttataattttaattattcgggaggttgaggtaggagaatcgtttgaatttgggaggtagaggttgtagtaagttgagatcgcgttattgtattttagtttcggcgaaaagagtaaaatttttttaataaaaaaaaaaaaaagaaagaaagaaattttaaaattttagcgatttcggattttttggatattttttttagtttagtttttttagtttcgtttgtgatgcgtgtttttgtttttaatttaaaatgtttgcgtggagaggtggaaataagtgtggggtttgcgggagggtcgtgtattacgtagaagaggtgtagtgtaatggtaggagtttttatcgttattgttttttgtttgtttgtttgtttgtttaagacggagttttgttttgttgtttaggttggagtgtagtggcgcgatttaggtttacggtaagtttcgtttttcgggtttacgttatttttttgttttagtttttcgagtagttgggattataggtattcgttattatgtttggttaatttttttgtatttttagtagagatcgggttttattatgttagttaggatggtttcgattttttgattttatgattcgttcgtttcggttttttaaagtgttgggattataggcgtgagttatcgcgttcggtttattgttgttgttttttatgtatgatttgtaggaataatttagatagtaagatagtggtaatttatgattaagagatttattgtaaattttgttatggaaagaagtatgggttaaaaggttatagtttatggttagggcgttggtatatttaatatggatcgtggtgagagtttgggtattaagttagagtgtttagttttatatgtttataagtaaatttaaagatttttaaatttgtttagaaatatagaggtgttgagaagtgttttagatgtggggatttcgtatatgttgttgagaaggtaattggagttggaaagttttggaataaaaattattttcgatgtgtaaagtgtgggaagagttttgaattaataatttttgattgaaaaagaaggtgaaatttattgtaaagggtgttatgtaaagaattttgggtttaagggatttggttatggttaaggagagggtttttgtttatgtttagtaaggtgtaaatttagaattaagtattatatattgagaatttttttataatttaggtatagataatttttttaaattattgtaaaattttattagtattaagtattatatattattttgtattcggataggttggttaattcgtaggaagggagtattatattttatttttttgttttattcgttagtattttttgggaattattttttttataatttaaataaaattttagtttgaaaaaaaaaagaaattttataaaatggtataatatgggtgaattttgaggatattatgttaagtgaaataagttagttataaaaagataaatgattgtataattttattatttaaaataatataaatttataaaaattaaagagtggaatgatggttagtagaggttgggagaaggggaaatggagagtagttaattaaagtttatgaagttttagttagttaagatgaataagtattagagagttgttgtataatattgtatttatagttaataataatgtatattttaaaatttattaagaggttagatttttttattataatatttttaagagaatatttttgtaagtaaaataaaaaagtttttatttgattttaagttttattagtgtttttaaatgtcgaggtaaaataaaagtaaaagttttatattttaatttttagtatatattattatgtaagtaagatttagaaataatattttggtatttatttttagttgttatgtgttaaatataattgtaaattatttataatataataaaatttaaagttttatttagataaaataaatttaaaggcgtttatatattattaatttgtttttaaaaaaaagaaatgttttttatttggtagttaagtttatttttatagaatttattattttttttaattgtaatgggataatatgttaataaatttattataagttgaaagtaataagttaaaaatgtattttatatatttaatttatcgaagcgaatattatagtttagtatagtttattttaaatatatttagtaatatttatattagtttatagttgagtaaaataatttaatataaagtttattttataaagtgttgattattttatgtatttaataaataatattgtattgaaagtgaagaatagaagtatagtttttattgaatgtttattgtttttatattatcgtgaagttgaaaaattttaagttaaattattataagttacggatttgtgtgtattttatttatagtaattaatgattttagttgttttaaggatataattagggaagtgaaattagttagtatatattgatttataaaagttatgtttagaaaaattaatttttaatatgagtaagaaaagtgggtaagaaaatattatttgtatggtttttggataataaaaagatagagaattgagagttgaataaaaaaagaaaaagaaaaattgagttgtcgagtggttgaataaaaaaagaaaaaggagaattgaggggttaagttatatataaaggtaagatattaaagatttaaatagttttttattttattaattagggaatttgaattttgtttgtaatggtattagttgttttttcgttaaggtaaaagaaattggtattgtagtaatatataatggttttgaaaagaaaaaaagaagaaagaaaaaatatatatataaatttaagtataaatttaatttttaattttattaattaattattttttgggttcgttttttaagaaaattatagtttcgattttattttatttttttatttatttttattttttgagatggagttttgttttgttgtttaggttggagtgtagtggcgcgatttttgtttattgtaatttttgttttttaggttaaagtaatttttttgttttagttttttaagtagttgggattataggtatatgtagttatgtttggttaattttttgtttttttttttttttgagtagagatagggttttatcgtgttgtttaggttggttttaaatttttaagtttaggtaatttatttattttagttttttaaagtgttaggattataggcgtgagttattgtgtttggtttttattttattttaaatatttatattttatgaggatttttaaaaggaatgttatttaataggagattataagaattttatttattaattatatttaaatattttgttgttataaataagtttgttttatatgttttagtaatgttgttttttatatataaggatggttaattttttgttattaagatatataatttatttatttagtgatagtggatttggattgatttagaacgttttaggttaaatataaatggttaaatataaaatttaaaattatattattgaagtggtatatgtagaagaggtttattattgagtttttttgtttgaaatgtttgtagtatatttttgtaggtaaaagttaggtttagtttgtatattttatattttatattaagtttttaggttttattttttttatgagtttttttgtgttggtttgcgataattttgaatcgattatttatatttagttttttattacgtaattattattgtttatttaaacgtgttttttttttaattatattataaatttaatagttataagaattgtaggttatataaattaatatttattatgtttggtatatagttggtatttagtaattgttaaataaaaggataaatgaaaaattaagttaagtaatagattttttttttaattttttaattaatattatatttttaaataaaaattgtatatttttataattaagaatgaattaggtcgggcgtagtagtttatatttgtaattttagtattttgggagtttgaggcgggtggattatttgaggttaggagttcgagattagtttggttaatatggtaaaattttgtttttattataaatataaaaattagttggacgtagtggtaggcgtttttaattttagttatttgggaggttgagataagagaatcgtttgaatttaggaggcggaggttgtagtgagttaagattacgttattgtattttagtttgggtaatagagtgaaatatcgttttaagggggggaaaaaaaaaaaatttagaatgaattaattttagtaagtttataattaattttttttttttttaatttttattaagaggtaggaaggaatttttttgttatttaaagtaataaataagttaaagaagatttaataatttaattgttttttcgtaggtgttaatgttttatttgttttgtattataataattgtagaatatttagatggtttttatatttatttataaataattgggttttttttattgaaatttatgttttttatgtttttatgtttaaggtatgttatggggtagggaggtagaacgtgaaagggatgggtaattaaaattttagttaagtaagttagttttatttatataattatttgtttaatatttattagtaatttatatttatgtttttaattttttgttttaatttttaatttttttattaagatataattaaagatattttttatttaggaggttaaagtagaagattaagagtttaagtttaagttgggtaaaatattaagattttatttttttgttttttaaaaaagataaagatattttagaatgatattattgaatataaagtagttaaaagtaatttaatatgagttattaatttgaatgggtttttttttgtaaaattatagggtttggttggtttgaaggtagttgagttattttaattgattgtttatagttagttatagatttaatatttttttattttttttttttttttattgaaatgtatttgattagttaaaataaattaaaaaaaaaataaataaaaaaatttatatggtttaagttttaaattaaagaataaaaatgtttagttatgaaatttttatagggtatttttattttaaaagattaattatttatttttaaaggatttgtaagaaatatattgtttttagtttgaagttttgagttaaaaaaaaagtttaaaattttattgattttatatttagttatttatatgttattatagtaatagttggaggaaatataataggaagaagagtattaaggaggaggaggaggagggaaagagtaggtttgttcgttaagttgttaagtattagtgtttgatgttgagtgttttatttttaatattttatttaattttcggaaaataatttgaagagggtattatttttattatttttttagatagggaaattaaagattaaagaagtaatgtgtttaatataaaaagaaattaataaaattagtaagtgatatggttaggaatcgaattattgtgtaatattaaaagtttttttttttaattattgtataatatttaaattagttaggttatttaaaagttttaaagtaaatttagtttaggggattaattttagtatagtgagattagatttaagatttaagaatataggtttttttttaattaaaagtaaatttagtgtaaagaatttttttatttttttattttttttttttttttatatatatattaaaaaaattttaaataaatatagtagattttaattttggaaaaggagaaaataattatttaaaaatagtatgttttaagtatagtaaggttgtatagttttttgatgttaataagatattttataaatattgttatatgaaaatatatagttaaattgtataatttttgataggtgggttagtagtattaataatttagtattattaggtatgttacgaggttttattttgttaatattttattaataatttagataaatattgaatagtatatttatttaagatgatattaatttaaggttggagagggatatttattttgttttataattaaaataaaatttttttttttttttaaatttatttattttttattatattttaagttttagggtatatgtgtatattgtgtaggttagttatatatgtatatatgtgttatgttggtgtgttgtatttattaattcgttatttagtattaggtatattttttaatgttatttttttttttattttataatagtttttagagtgtgatatttttttttttgtgtttatgtgattttattgtttaatttttatttatgagtgagaatatgtggtgtttggttttttgtttttgcgatagtttattgagaatgatgatttttaattttatttatgtttttataaaggatatgaatttattattttttatggttgtatagtattttatggtgtatatgtgttatatttttttaatttagtttattattgttgggtatttgggttagttttaagtttttgttattgtgaataatgtcgtaataaatatatatgtgtatgtgtttttatagtagtatgatttatagttatttgggtatatatttagtaatgggatggttgggttaaatggtatttttagttttagatttttgaggaatcgttatattgatttttataatggttgaattagtttatagttttattaatagtgtaaaagtgtttttatttttttatattttttttagtatttgttgttttttgattttttaatgattgttattttaattggtgtgagatggtattttattgtggttttgatttgtatttttttgatggttagtgatgatgagtatttttttatgtgttttttggttgtataaatgtttttttttgagaagtgtttgtttatgtttttcgtttattttttgatggggttgtttgttttttttttgtaaattggtttgagtttattgtagattttggatatttgttttttgttagatgagtaggttgcgaaaatttttttttattttgtaggttttttgtttattttgatggtagttttttttgttgtgtagaagttttttagtttaattagattttatttgttaattttgttttttgttgttattgtttttggtgttttggatatgaagtttttgtttatgtttatgttttgaatggtaatgtttaggtttttttttagggtttttatggttttaggtttaacgtttaaatttttaatttattttgaattgatttttgtataaggtgtaaggaagggatttagttttagttttttatatatggttagttagtttttttagtattatttattaaatagggaattttttttttattgtttgttttttttaggtttgttaaagattagatagttgtagatatgcggcgttatttttgagggttttgttttgttttattgatttatatttttgttatggtattagtattatgttgttttggttattgtagttttgtagtatagtttgaagttaggtagtgtgatgtttttagttttgtttttttggtttaggattgatttggcgatgcgggtttttttttggttttatatgaattttaaagtagttttttttaattttgtgaagaaagttatcggtagtttgatggggatggtattgaatttgtaaattattttgggtagtatggttatttttataatattgattttttttatttatgagtatggaatgtttttttatttgtttgtatttttaatttatagtattaaatgtttataagagaaagtaggaaagatttaaaattgatattttaatattataattaaaagaattagaaaagtaagagtaaatatatttaaaagttagtagaaggtaagaaataattaaaattagagtagaattgaaggaaatagagatataaaaaattttttaaaaaaattaatgaatttaggagttggttttttgaaaggattaataaaattgatagattattagtaagattaataaagaaaaaaagagagaagaattaaatagatataataaaaaatgataaaggggatattattatcgattttatagaaatataaattattattagagaatattataaatatttttacgtaaataaattagaaaatttagaagaaatggataaattttttaatatatatatttttttaagattaaattaggaagaagttgaatttttgaatagattaataataggagttgaaattgtggtaataattaatagtttattaattaaaaggagtttaggattagatggatttatagttaaattttattagaggtataaggaggaattgttattattttttttgaaattattttaattaatagaaaaagagggaattttttttaatttattttatgaggttagtattattttgatattaaagtcgggtagagatataattaaaaaagagaattttagattaatatttttgatgaatattgatgtaaaaatttttaataaaatattggtaaaacgaatttagtagtatattaaaaagtttatttattatgattaagtgggttttatttttgggatgtaaggttggtttaatatacgtaaattaataaatgtaatttagtatataaatagagttaaagataaaaattatatgattattttaatagatgtagaaaaagtttttgataaaatttaataattttttatgttaaaaatttttaataaattaggtattgatgggacgtattttaaaataataagagttatttatgataaatttatagttaatattatattgaatgggtaaaaattggaagtattttttttgaaaattggtataagatagggatgtttttttttattatttttatttaataaagtgttggaagttttggttagggtaattaggtaggagaaggaaataaagggtatttaattaggaaaagaggaagttaaattgtttttgtttgtagacgatatgattgtatatttagaaaattttattgttttagtttaaaatttttttaagttgataagtaattttagtaaagttttaggatataaaattaatgtataaaaattataagtatttttatatattaagaatagataaatagagagttaaattatgagtgaatttttatttataattgttttaaagagaataaaatatttaggaatttagtttataagggatgtgaaggatttttttaaggagaattataaattaaaataaaattttaataagttgattattaggtagaattaacgagaagaggtaatatattattattttaatatttataaaagtatatacgtatatttatgagaaataaatgtaaaaatttattattagttgggtgtcgtggtttatgttcgtaatcgtagtattttaagaggttaaggtagtaggattatttgtatttaggagtttaagattaatttgggtaatatagtgagattttaattttattgataataaataaatataaatataaatatatatataaaatttattattatatcgaaaaattaattattaatatattagatgttaaggttttataataataatttagataaatatatgggttaagttgattttatatattatttaaagagttgtaaaagtatttttagtgtaaatttgttgttaaaaaggtaaatattattttaaattgtattatgagaaagatagttttttagtttaagcgagttaatgagtttagattattttataataatttaattatattttgagaagtttatatttagtttagggtattattagagtttgttattaagtatggtatattatggtgatatttttggaaatgaggttttaagatgattagtggaaggaattaggaatattcggtttagagaagtatgaagggtagtatttgattattaattggattttaataaagatttttaaataaaggatatgataggtatttttaaatattttaagatatgttatatgaaatatgatattttttttaaagatagaattagtattaatagataaaaagtttttaattattaggaagtttttaggagagatgttggtgttatttttatatggggtgggaaattggtttttttattttaaaaattttaggaatggtttggtaaaatttagagggattttattgtttttttattgtttgtggtattaaggtttttgaaaatgtattagtaatttttgttaagggagatattatgaaatggttattttttttattgaattttaagttttagagtatgaatttaaagaatagtggtataattaggttttaatgtttttaagtatttttaaatattttttgtatttaaagaattaaatatttttaaatattttttatttgataaattaaaaattagtataattataatttttaaaagataaattttattttttttttatatttataatatgtagaaatgaaaaatatggttttaaatattattaaatatttgtatttaagaattaattttaatttattttttatatagtaataaaaattataataaaatgtatttatttttggatattaatagggattatatataaaataattaaattgttttagagattaatagatattatatataaaataattaaattgatagaaaaaaataaatattttatttttaaagagtagtattaattttaattttatttgtattattgagttatttttaatgattttttagaaaataaaaatttgtttattgttttaaaaaaagttaagtaatgagaaaggatttaatgagatttttagttttattgtttagaagtaatttttgttaattatttttgtgtatattgttagttattttttatataggtgtgtatataagtatttttggtgttttttttttttaatttttaatagaattatataataataaattttgttatttaatatattttggattttatgttattttatatattaatttgttttattttttttagtggtttatagggtattttattgtatgtagtattttaattttaattagtttttttgatgatatttaggttgatttttgttttttggtattataaatgttgttgtagtaaatattttgtataaattttttggtatatttgtgtaagtataggtatagaatatatttttgaaagtgaaattttggttgtttatattttttattttgatagttattgttattgatttttaaagggattgtgttaaaaattttaaatttagaagtttttattttttttatagtttagttaagattagttattattatattttaatttttgttaatttgataagtgaaaaattataattttgtttttaatttgtatttttttatgattgaggttgaatatttttttatgtattttttggttttttatttttgtgaaatgtttgttatttagaataaggttatatttaaatatagtatttaaaaagttttatgtttgtatttaagtaagaatattatatttttaaagtaaaggataatttaaggtaatgtttatgaaaattttaattgtttttttaatagaaatggataaattgattttaaaatttatatggaaatgtaagggatttagaatagataaaataatttgaaaaaaaaaaaaaagaaaggtagatattgttaaaggttttatatttttagttttaaaattaatttattataaaatttatagtaattaaaatattatggtatttatattagtaaagatatataaattaatagaatagaatttagagtttagaaataaatttataatttttggttaattgatttttgataagggtgttaagatatttaatggaaaaagaatagtttttttaataaatagtattgggataattggatattttatgtaaaagaatgaaggtgggtttttatgttatattatatgtaaaaatgaatttaaaatggattaagcgtgagagttaaattataaaatttttataatttttattatattgaattaggtaatggttttttagatatataaagtataaataataaaagaaatatatatataaattggattttattataattttaaaagtttttgatgtagaggatattatttagaaagtgaataggtaatttatagaatgggagaaatatttataaattatatttttgataattattttataaatattgttgtagtgaatatttttaggtaaatatttttgtatattggtataagtatagaatatatttttatttagtatttagaataaacgtatgtgtgtgtgtgtgtgtgtgtgtatatatatatatataaagaatttttataatttaataaaaaagtaaataattaaattataaaatggttaaaagatttgaatagatatttttttaaagatatataaataattaataagtatattatattttttagttgtaaaattaatttatcgtaaaatttatagtaattaaaatattgtggtatttggatttgtaaagatttataaattaatagattagaagttagagtgtagaaatgatttttgtatatgttgtgagataagagtttatttttatttttttgtatgaagaatttatgtaaaagatttttgatatattattagttatttgggaaacgtaaattaaaattataatgtgaaattattttatattttttaggatgtaatggaaaaaaaaaaaaaaaatagtaaaatgttggagaggatgtggagaaattaattaaaagaaagttttatatattgttagtgggaatgaaaaaatggtttaattattatggtagttatttaataaattaaagatagaattattatgatttagtatttttatttttaagtatatatttgaaaaaattgaaaatatgtttatataaaaatttatatatgaatgtttataatagtgttattttttgataaaaagtagaaattgatgaataaataaaatgtgtatatttatataatggaatattattttatcgtaaaaagaaatgaagtattaatacgtgttagaagttagatataaaaggttatatattgtatgatttaatttatatgaaatatttagaataggtaaatttataaagataaagtagattagtggttattaggggttagcgaaaggggagaatgggaagtgattgttaatgggtaaggggtttttttttggggtgataaaaatgttttagaattatattaatatataattttgtgattatattaaaaattattgaattatatattttaaaatgataaattttgtggtaagtgattttattttgaaaaagaaaaatttagtaaaggatagggtttataaaatattttatgatttattatagttatgagagaattagtatttatattgtaggtggtttcgggtttaaaattgtgtatatagaataaataagatttagtcgatgggtatgattttaagtattgatagttatggggttatagttgatattaatttttaagtgtaaacgatgtagaaatgagagttgaaattaaggaattaggtaagtaagtttaagagaatgattgttaaagtatatgttttttaattgttgtttggtaaagtaattatagttgtatttaattttaagtaaatttagtttttttaagaatatatttttattataaataaatgggagagggatattgtgttatgatgaaataggatgtaggaggaatttaaaatagtatataaataataataagtgaatttaattttattataagtgattaatataatttttaggtagggatgaaaagaatttaagtaatttttgaaaatagaatttgtttgtatattataaagttaaagataaatattgtattttagtttaaaattgtgttttttattagggaatgaataggttattaattttaaaattatttttgtttgtgtgtattcggatgaaataagtaagttaatatattgtggttgagaatagttttttatttttggagaaggaagtaataaagaaagagaaaagggttgaataggaaaaaagattaaaatggattttatggtggaagaatagaattggtagtattattggtagttttttatttatatatatagatggatagataagaaaataaaaatatatgtgtttatatatgttattaaatatatatattgttagttttatttattaagagagtttagaagtaatgatatttagtagtatggagtatatttggtatttagattttggtttttagatattattttttagtaaaatgaatttagttttttggaaaaatggttgattttatggttggtgtaagtaggaaaaatataagatatatttagaatattatgtgatattagaaagtaaattagtgtttataaaatgagagagggtattgtagaaaagatataggaataaatttttaagtgtttttaataattaaagcgagaatgatttgagtaataattattggattttaatttataaggtaaaatatttataaagttatgtaaataaattaattggataattaataagtaaagaggatagtatttttttaattgtagaattttaaatatagtaagaatgagtgaaatagaaaattcgttattaagtaaagattaaagtagtaataattgttgttagttaagaattattgatagatagtaaaatttgtttatgtaaagtatgatggaatataggatattgtaaaattggtttatgataagtatgatgggatatagtatatttgtagtatttttttattagaggaaggtattaattataaaggaattattaattattatataattataaggttaaaatgaatatttattattataaaggaaaaagtagtaattttataatgaagaaatttggtagatatagttttaattaagtgattatattaattttatttattataagatatgttaattacgggtgaagatttgataattttatattgagaaatattttaaaaaataattaatagtattttttaaaagtgttagtaatatttataaaagatgagagaaaaaaaagattgaaaagtttaatagatgggaggagattaatatgatgataattaaatgtaaggtaggattttaaattggattttgaattagaaaaaggatagtttataaatgtgaatgttttggttttaataattatattatggttatataagatgttaatattaggagtaattgggtaaaagatatttaggatttttttgtattatttttatattttttatgtaagtttaaagttattttaaattttaaaaattaatataattttagaagattttagaaaaattttttaaagtaaagtaaatttttttattataattgaatttgtatttaatagttaattatatttgaattatattgttattttgggaagaatttggtattttttgattattaaattaaaaagtgggtataatattttatttattgatatatttgtttgtataaattattttaggtttgaaagaaatttggtataaggatggaggaaaggggtattatattatttatatattttttaaattcgtttattttgttgttattttatattaagtatgtaattagtgttttttaaagtttttagtgagtaataattattttattagtaatatagaagatggaaaggaaaggaaaggaaaggaaaggaaaggggaaaggggaaatgggaaaggggaaagaggaaaaaggaaaggaaaggggggaggaaggggtagaaggaaagaagggagggagggagagaaagaaagaaagtttttttagatttttttatatttttttttaatattttttttattatgattaatgatatttattttataaagtagttaattggtgaatttaattttataggttatgataaattaaatttttatgaaaagatattatggtggtatttttaatattttgtgtttttagatttaaataattataggtataatggggagttacgtaagtttttaaaagtagttgatagttaaatataatttaatattatttaaagttattaattttgaattttatagggttaagttaatcgataatttatttgttgttataaaatgtattttgttattattttttatgtttaagtggtgttttttaaaagttaatttttttaattaattaattaatgaatggaatatttaaataattttagtttaagatgaaaaataggtaggttatttttaaattttatttgtaattaataaaacgtatattagtaagtttaatatatagtttatcgaatttaaggatttttatttatagtaattttattttatagatggagaaaataatgtatagtaagagtaaatcggttttttttttaaaaggaaagaaatagtagtaaagaattttagtgattttttaaaaatgagaatgttatataattatgtatatgtaaggagattttaaatattgaggttatgattggaatagattattaagggattggtattagagatgaaaatatcggtggttttgtttttaatattattgaaatatttaatattttataaaataaagggaatatttaatattttataaaataaagtaaaaagatattcgataagtaaaagaaagttatttaatgaagattttaaaaaggaaatttaaggaagagttttgatttcggggggggtttagttagaataaatggataaaaaggaaaaaggtaatagatataggaggtttagtattttttatgagaaataaaatttagtatattttggttttgattttaaagaatagtaaaattgtttttaaataataatagttttgtgagtaataaataatatataaaatgtatttataggttaaaaagtaaaatttaagggtttaattttattgatttatattaagggtttaattttattgtttattgttaggtgaatattaaatattgaattttgaaatagtataaatttaaattaaagtataattaaaattataatttgataaaattatgagaaaagtattaagattataaaagttattttatgttttttaggtattttatttattttttagaaaaaaaaaaaaaaaaaaaaaaaacgtgaagttttgaaattagtagttaaaagattaaaagtaatttttttaaatttatttattaagtaaggtaagggaaattaggatttgttgagaggtttttttatgttaggtatttgtatatattttgtttggtttaattttaataaatttgaagtagttataatttttttataagtgaggaaattaaggtttagaggagttaatttttttgtcgtttgttagaatagtgttttttaattttggtattattgatatttggggttaaaaaattttgagggtggcggggggaggtagaagatgttgttttacggattgtagtatgtttattagtatttttggtttttatatattggatgttagtagtatattttgagttgtgataatttagtatttttttaaatattgttaaatgtttttcgggggtaaaataattttgagatgagaattatttagaaggaagaagttagtatttttatttaattgatagtaggtacgttttagagtttgtttaagatgaataaaggataaattgaggtttttgtttttaagagtttattttgaattttggtgtttgatttaatatttttttttatgtatagttatatgagttttatattatgatagtttgatttatatattttttttagttagtttttaaatcggtttatttttttaattataattaatggtatttttattgatttaaatgatattttgtagttatgtttgatttaattatttttttaattttttgtatttagttattgtttaagttttgttgattttttttaggagtaaaatatttttgttatttatttttattttttatttttattattttaatatagatataaattatattttttttattttttaatagatgaaattaggagtaattaattttttttggttttttatatgaattaggggtatatattaagatataataattgatttattaatttttaggatagagggttggtagattttagagtagtttttaatgattatatttttttttggggtggggagggatgttggaattttttatttgatattagttttataagttaaatattaatttttaagtaaatagtaatttttataagtattaagaaaaggatatagtagaaattagtttgtatattattataaagtggtttgtatgttatttttggtatttgtgttatgaattgtttttgtttgttttaaaagaaggtagaattgatatttaatagagtaagtaaggtataatttttaagtttaattaagttaattaatatttttatttttgatgatgtagaaatttagatgaaggtaggtaaagtaaatatgttgttagggaaatattaaaaatagatggttaaataaaatttagtgaaatgtttgtatataaagagagatataaattttatatataatatatataaataaaattatagtattaaaaggttaatttatttatattataaatgaaaaaggtttcgatttaagatgagaggaaatttaggatttggtttaaagttggattttgtttttaggtagagaataatagaacgtttatgtattaatgtattaatgttttattttttttaattttaggatattataattaagataaatttttgaaatttataatttaattaaaatttttaatttttattttgcgtgtttaaatttttaaaaaaatatatttatatatttaaaaaaaaagtttgatgagtgatattttaaatatttttatttattatttttgagtttttttataaaaggttgatggtaaatatatttattatttagggttttgttttttttaattttattaagttgttttaagtaagtaaataaataaatgaaagtaatttttataaggatgtattaatattttaaagttttttaaaagaataaagaatgttatattaaagttgggtacggtggtttatgtttataattttaataatttgggaggttaaggtaataagattgtttgagtttaggagtttaagattagtatgggtaatatattaagatttcgtttttaaaaaaattaagaaattagttgggtatagtgatgtgtgtttataattttagttatttaggaggttaaggtagggagatcgtattagtttaggagttaggggttttggtgagttataatgatgttattgtgttttagtttagtttgggttatagagtgagattttattttaaaaaaataaataaataaataagtataaagggaaaaaaaaggatgttatattaaattaacgtatttttttttgagggagggatacgagtttaggttagtatgtttacgaaatgattaaatgttaaattaaaaggtttttatttaagaaagtaattataattaataggtatattaaataattttaatttatatattttttaatatttatagtagaattaaaaaaagtagagatagaaattgaattagatatttagttacggttattttaagataatgtttttgatttcgattattattgttttttgtttataatttaggatagttttttaatattttatttaaattttttttaaatatattataggtttagtttaaattaatttaatttaatataattggtgtaatttatttgtaattttacgatttatatttttgtcgtagtaatttaaagtttgaagatagaagatatatagttgattttttaataatatgagttttaattgtaaaggtttatttatatttagatttgtttttgttattcgagatagtaagattaatttttttttttttttagtttatttaaagcgaagataatgaggatgaagatttttatagtgatttatttttgtttaatgaattataaatatatttttttttttttataatttttttggtaagtttttttttttattttattgtaagaatatagtatataatatatatagtatataaagtatgtgttaattgattgtttatgttattagtgaggtttttaggtaatagtagagattattagtagtttagtttttagagagttaaaagttatatgtagatttttaattgtatggtgggttagtattttaatttttatattgtttaagggttaattgtattaataaatgtatataagtagtagttatatatatttaagaggaaattattaatttagttttttttttgagagatttttttttttatgaaatgatggtattaattttaggatgtattttttattgttttttattaatatttgtttatatgaaaagtataaagataattttgttataattgatgtttgaaattattattaaaaagaatttgttttaataaagtaaatgtgaggggattttttgaattgatttttaagatattttaagatgttatatgtaataacggtgtaatttaaaatttatgttaattttattattaagttatagtgtttttggtatttttaaaataaaatttaattttgtaaaatagattatggttaattaagatttttaaaattagttttgggtttttaggggtgtgttttttaggaaattattttgttttataatgttttgcgttaatagatttgaattttgttgattttaaatgaatgataaaaatatgaagataaattaagtatttggaatttaattgttagaaggttattgtatataagtattttttatagtattttttggtttaaattattatagtttataaaatgttatatatataattttttttagttttaatttttttttagagtattaattaagattattattttatggataaaattgtaaataatataaattatattttttatatttaaagatatatttttataatttggttttttatttttagttaaaggaataaaattaaggtggttttttatttttttttttttatagtttttttaattatagtaatgtaatttttttttgagatatttttagttgattaataatttgaaattgaattaagaaattgtttttaaaagtaaagtgtaaatataattatttttaaataaaaaagattggggtattgttttttatatttattagttttgtttataattttaaattaattatgttttgaaattttgaagattattatatttttatttattagttaaatatttaaggttatattaaagttttatgtgtattaaagttatattgaattttttatgggaaaggttaaatttattttaaaaaataaatttattattagaaaggaaaatttatgtgtaagtttttttagttagatatattttttttagtaagttattattttaaatatgtaattaatttttaaaaattaggtaagagttgtttatttgtgtattttaagatgtttaagcgggatttgtttagatttgtgataaatatgtaaaaataaattttaaaggatttggataaaattttaatttacgattgaatgttaagtagtttaaaaattttaggaaattaatattttaaacgtttttagtgataagtagaaagtgtttatgaaatattttggagtttatagttaaaaattggttaagttttgttgagaaagtttaaatgggttttaggaaaaaagtttagaagaatttaaatcgaagtgttaaagaaaatattattattgttgaaggaattaatatatggatgaaattattttttttttatattattgtaagttatttaagaaatttttatgttgatgttttagggaaatattattaattttatattgtttatatttataaatgtaattatttgtatatttattggaggatatttttattagggaatagtagtattatttaatttatttaagttaattgtatgttaaatattgttttggcggttttatttattatttatattaattttgtaagagggtattattttatttatagatgagataatttaaaggttgagaaagtttagaagtttagtaatttgttagattttttaggagaggaaaatattatttgtcgggttttaaatttaaatttgtttttttttgtattggattttggttttttggtagagttttaattttttttgtaggtttaaaagtattaatgttatagaaaattttttatttaattttatttattttttaattaataatgataattttattttgagtatttggttattattgtttttttttttaatatttaattgttatgataatattaatgttaggtggtttattagtatgtattaaatatttagttaggtaatttataattaatatttatcgagtatttattatgtgttagatattgtttgaatgtttataataattttataaggtaggttttattattatttttattttatgaagaaacggaagtatagaaaattttaatatgtataaagttaaatggtaagcgacgaatttagtatttaaattagtttgtatggttttattataatttaagtttttaaacgttattatttttattttataagagaatttatatagggttttttatttaatttttttaattttgtgagttaaagattattaattttaatttatagatgaagaaatataggtttagaaaggtgacgtaatttatttaaaattatatagttttaagtggtttaagataagttagttaagatttgaatttatttttgttttatatttttaaattgttaatattatattatattaaagaaggatgaaaattataaaaaggtaagtgaataataaaaaggtataggtattaatttatgtagtttaatatggttagttatttttgaaaatttttaggttatatataggtttttttttaaattgtttatatataaaaaaaaatgtgacgatagggagaaattgataaaaatggttttttgatggttaagaataacgggatagaaaattttatacgtttttaagaattgtataattttttattatgaaattataaaatttatatttggttataaaatatagagatagatataagtaggtattatttttttattttataattatttttttttattttagtagataatgagaatcggttttattatttatgtttttttttttgagagattaagaaataaaagtaatatgaaagaatttatttattttaggttatttttttaaatttggtattattttgaaaataagtttataaatatatattaaatgttagaagttatttaagatgtttttattaagaaataagtatatgaatgtatttaatattttttgttttatgtgtagaatggatttgttttttttaaattaataaatttaaaagagaggaaaaaggtttagaaaagtgattttttttattattaaaaatattattgtttttaaatgttttttaagatttaattagatagtataatttttttgtagttatatattttagtattttagaaaatgtttttcgttaattatttatttagagtaaaatttgttaatataattatgttttttattatattttttatatagtttagaggttttagatagtaaaatatattattgtatttataagaaatatttattttaaaattattagttttagttagataattaagtttatatttttaataatggaaaaataaattagaagtagttagtaagattgtagtttttttatattagatatatattttttaaaataaattatattagaggaaaaaattgttatttgttaagtattttttatagtattttgtagttcggttaaaggtagaagaaaaaaaaatgattacgtataagttagaagttagtttaaagaataagtgttgttttaggagggggaaaaaaaattatttatttatagttgtttaataattttaaaaataattagtgttgtgtaggaaaagtattaaatattttaacgaggttaaagggattatgtaatatgtgaatgacgatttaatgtgtttaaagtgtatagtgaataaataggtttcgttgttaattttttaaatgatgttttgaaatagggtggaattttaagaaaagtatttattttataatattttattaaatttattgggttttttttgtgaattgaaaaataatgagttttttttttaatgttagatataataaaatatggtttgtttttttataaatgaattttgttatatattatatcgaggtttgaaacgttaatatatagagatgtagttttatttttttgttttttatttttattttttttcgagtaattttttttaaatagttatttaaatatgtatagacgttatttgaaatgaaaattttttttttattttttaagttgaagagagtaggaattttttaagaaagttgaattaagtttagttatttatagaattttaattttttaaatgttttatgttattaaaataaaagttggatattttaagtaagtaaatttttggatattttatatatatagtaaataaataagtttacgaaaataaaaaggtggaaaaataaagataatttaaaagtaaattattatatttttaatttcgcgttgtaatcggtcggttaggggtttttatttttattttttatcgaaattgtattcgggttgatggttataaagtttttagtgttagttacggttatattgggaatagagaggagaggaggaggataaggaagagaagttttcggaattttaggttgttattttcgttttcggttacgcgttttacggttgtttttattatttttagtagtagtatttgtaagagaaattaggagaagcggcgttgacgagaggttgaggaaggagtttttcgtttagttattatttcgggagtttttttttttaagatttcgtattcgtttcgtcgtgtgttcgtaacgtttttagtttacgttagcggggcggcgttttagagatgtttttttatttaggggatattcgaattttttttttttttagaatttggaagtttttagaaatgggggtaggaggtaatattggtatttatttaaagtttcggatagtttttttttaggttgcggggttttagtcgcggggttcgcgggggcgtttcgcgcgtttcgggagaagaggagttgttcgcggggtagcggtgcgaggcgcgagtttgttttcggcgtgagaagaagcgagcgggagggaggaagggagggagagagggcgggcggggaggggagagaagaggaggtgaggggattcgttacggttcgtcgggtcggtttcgcgaggtcgtgttggtttgttttcgttttcgatttttgcgtttcgttttttttcgtcgtcggtcgtttagtcgcgtttcgtatttttgggttagtcgcgaatttagttttgttattattattttcgttgagagaggtgcgcgtaggcgtattcgtgtttacgggttgggaaggcggaagtgaagtgaaggtcgagatttcggttcggaatggataatgtttgggtttggattcgttcggtaggaggtcgttcggggttggtggttcgttttgtttttgttggcgttttttttattttagggacggtgttcgttcgtttatatgtattttttgaacgcgagggtcggagattcgtttacgtttcgtgtcggttacgtattttcgtggggcggtcgcggggtcggtttaagttgatagttatggtcgttgttttcgaggcgtttaagcgttttttataaagtttgtaggggaagttgttttcgtcggggtggtagttataattttagtaggtaacgttgaggtttacggaaggaaggggcgaggtgtttatgtttttgttagggattggagtatcgtgagtagtttttcgagtttcgtatttttatttgtaaaattttgtattgattgtttggtttttgcgggagtcggtaatcgcggggcgattttttaaaattttgtaaggggtgtgtttagttattatgtgtaatgagagagtaaggtttagttttagagagttttagggagagttaattttttttattcgtttgtggtatatggaattggggagaggttggaatagtaattagaaattagtcgtatagttgtcgaagttaatgaacgagtattttttttagtagttgtatttttgtttagtgttaatgtttttttatacgtaaatattttatttgttcggtattttatttagatttttaataagtgttttttaatgaacgattggttttaataaatcgtggtgagttagatatataatgttgaatagaagtttttttatatttataattattagagggtagggttttatttattgagttggtgattattttatagagaatttaaaagaaaattttcgtatatgttagatgtgtttttttttattaatatttagatattttataaatttgttttttattttaggttttgtaatatatcgtagtgtgttttttaattatacgtttaatattagaattaacggacggggttgtttgtgtttttatatttgtttttaagtaagtggtattagattaggattgaaaattttggatagttttttagatttattttttttttaagaaatattgaatttttatttagcgaggttatttttaaagatgaatttataaaaattattattaagtagatttttagttttaacgagttaattatgatttatttttggtatgtatggttagtgatttttgtttgtataatgacggagttaaattaacggacggggttgtttgtgtttttatatttgtttttaagtaagtggtattagattaggatcgaaaattttggacggtttttagatttattttttttttaagaaatattgaatttttatttagcgaggttatttttaaagatgaatttataaaaatattaagtagatttttagttttaggagttattatttatgatttatttttggtatgtatggttagtgatttttgtttatataatgatatagtttgtgatttgtataatgattgtgatttttcgtaattaatttgtaatagttattattgtatatattcgattttgaaatagtattatattaaaaataaaagtatttaaggtaggaaattatataatataaatattttgatattaatatatgtatttataaaatagagggtaattgtatagaatttggtattgggttattttagttgaaatatttttttaaagtaattttttagaattatttgttgtattaatatattgtaatattttagtattaatattgaatttataatttttttaaaagatttatagttttatggtttatttttaaaatgatttaaattgaaattttatttttggttttttaaattatgaaaattattgtttttattattaagttaaaaaagaaattggtaagattaagattaattttattaagaagaattgattaattagttattttatataaaaaatttaagtatttggaaattttggtgtttgagggggttttggaatcgattttttgtggataatgagggatgattatatatatatatatgttatatatatatatatgtatatgtatagataaatatatatatatatatatgtatatttatatatttatatatatatatatattagtttttttttaaaagatttttgtaagaattttataaagtaagtgaatataggttgtaaattataagtattatagaagtataagattattatagagagaattaaggaaatttttggagtgttagttagttataatgggattgatggtaatgaaatatattatttttaagttttagtttattgtttttatagaaattaaagttttaaaaattttttttattttttttttgttttgaatatttaatttataaaattaaatgtatttgatgtaaaaagtggttacgtgtaagaaagggaaatttgttaggttttttcgtttgggggaaatattataaatgggaaagattgaagaagaatggttatgatattttaattttttttatattgtgttttattttataaagggtgtgcggtattttgtttttaatattaaatttgatagttgtatttttataaatttggatggtataagaatatgtggttttttagggatttaaaaattaaaatttggaaaaaattattttaaaatttttttttaattaattaatgtttttttttaaaggttgttttaatgttgtttaaagtattagaggttaatagttaagaaattttatttagttgttagaaaagaaattgtaattttattttaagttgaatattttatttatttatttattaatttaagagatagagtttttgttattgaggttggagtgtaatgatgttattatagtatattgtagttttgaatttttaggtttaagagatttttttgtttcggtttattaatgtgtttgggattagaggtatgaattattatgtttggtaaagttggatacgttaaaaatatataaagatgtattattttatttttataagttaatttattttaatagaataatagaagtatttttttttttataagataaaggatatgttaaatgttaagtttagaaaattatagttttattgttaagagtgttgtacgaaattagtttttaataaatatttattagaattgttataaatttgtttagttttatgttttggtagtgttggaagattaaaagttggaagtaagaataaaaattgaaggatttatatgagttatttgtgtttggttggttttaatagtatttagatttagatttttaagtattttataaatattttattatttataaaattttatagttttttttatatttgttagtattttaaatatgaaatatttgatgaaattgagatgaaatgagagaatttatatttttaatttttattgttaaagaagtttattttaagtatgatatagtttttttatttattggtttagattttgagttagtggtaatatttgggattttatatattattagttttttggattagatatgagtgtcgatgggatgtatgtgaaaataagaaagaggtaagagtaaagtgagtgtgagttttatgatttaagagtattatgattaatgaattttattatttttatggaaaatagatatataatattttaaattatataaattataggatttgttttgagatataaaggtatttatttaaatgataatattttatttagtttttaaattagtataatttatttttggttttaaaatatttgatagtagtaaatatgtaataaagatttattaaataaatggatagtttgaaaaatgtttattataaatattttttgttgaatgaataataatttatttgttttttatgattaaattaaaatttaagtttttatttttttgtaaaattaagaggatttaagggatttttaagaagtttaagggtttttggtgtattttatatttgtaattttaatattttgggaggttgaggtaggaaaattgtgtgagtttaggagtttaagattaggtttgattatatagtgagattttgtttttatagaaaataaaagtattagttgggtgtagtggtatatatttgtggtttttgatatttaggtagttggggtgggaagattgtttaagtttaggaggttaaagttgtagtgagttgtaattatgttattgtattttagtttgggggatagagtaagaaattgttttaaaaaaaaaaaaaaaaaaaaaaaaagtttaaagaataaatttatatttttaaaaattataaaggggttaattaggataatattatttgaatgggaataagttttaattgttgtaagaaatgttcgatat

SEQ ID NO: 2047 - DNA, 8297 bp, Artificial Sequence
  chemically treated genomic DNA (Homo sapiens)
tgtagttaaagtagacgggttttttgggttggtgtaggaagaatagtttatgttttcgaatatattgattacgtgttttatgtatttgatatatacggattcgtttattttatatagtattttaggagatggggttgtttaaaatattaatttttattgtatagttgaaaaaaacgaggtgtaatgaggttaaataacgagttttagagaggaggatttaatttatagttagtttttagagtttatcggtttaatcgttaggttggtttttcgttcgtaatgtacgtttttagttagaggtttttaggttgtgttttttatatttagttattgatatttacgtttatagtttttgttatatttatgttatttgtataattatttttttagtagtgatttatttttgaattgtaattttatgttattaatttaaatggaaaatgagtattatttattataaaaaagatgataattgtataaaataaaagtaatagaatgtgaataatgttattagagtttgggtagattcggggattagttaaggttttgaatttgtttagtttgttgaaaaaggagattacgtatatagaaaggcgttgaagtgtacggatattacgttgagacgtttttgttggtttaattaggaggaacgattagattatttaatttaaggttgtttattaggttaaattattttttttgttgggaaatgttttttagttttaacgtgtagttagaaaatacgggatataagttgatattcgaaggaaaaatattttttttttttttattttcgagtttttggttgggggttttgaaataaaaaatagatgaataagagaaaagtgaataaattaatttaatgtaagtttaatgtgatatgggaatttttataaggaaatgaagtgattaagtttgagtgtttttttgtttttttgagatagagtttcgttttatagtttaggttggagtgtagtggtgcgatacggtttattgtagtttcgattatttcgggtttagttgatttttttattttagttttttaggtagttaggattaggattataggtgtgtgttattacgtttatttaattttttggtattttttgtagatatagtttcggttgtgttggttaggttggttttttatttttgggtttaagcgattcgtttgttttagttttttaaagtgttggggttataggtatgaattattgtgatcggtttgagtgtttttattagatgttatgaatagtggagaattatggggttgtggtgggattagggggtacgagcgaagtatagagaattggagaaatagtaaggtttgtcggggttttttttagtgtttttagtgttcggagtggacggtgttttttttttttggttgtggagtttggtgttttgttttagggaataattatatagtttttttgcgtttgttgttttttggattttttttatttaaaatatttaatatgcgaagttgttatattttggggtagcgtgttttgaattattggttataaggtcgcgggttttatatgaggtatagttggtttttgagatagtgatattatgtatttcgtggaggttattgttttaaaggttttaaggtgtggatttttgggaaattaaaataggttgtttttaaggtttaagtggaattgatttttaatagtttaggtttacggtgtttgtgcgagtaaatgaagaaagtgtttttatagtaagtttttttggatagaattttgagggagagagagaatgagtgaattagaatgttggatgttttttttaaggtatttgtttaaaaaattaggggaaaaatttaggagtagagttattatttgtttttagttttgaggatttgtgtttgtgaggtatatgagtttatttttttagttttgtagataaggaaattgtggtttagagagatggagattttatagataacggtttatttggagtatttttttttcgtttgattttatatttttaggatgtatttattagggttttagtaaaaaaaagagggtatattttaattgggtaataggaagaggatgttaatgaagcgtttttttatagtgttgtaggtagtatattggggttttgcgaagagtaggtagtattttgggtgttttagggttggtacggtaaagttttagtattttttttattttttttttttttcgcgattaggtttttgataaaagtagtgaattttgttttaggtttggttagtataaaggtttttaagagaggagttaataatattttatttttttttttatttttttttaggtttttgttggggtttttattggttaaatttaaagagaagtcggaaggtaaagagtttcgtggtatttattagggtttttaagtaggggttatagaggagaagttaggaggtgatttggagtaggatatagtagttttttgatagggatttttatttagggtacgtttttagagtagatggagaaaataatttagtagattttagatttttaaatttttttagttttttaattcgtttgttttttggatttcgggagaaagttgagagggaaagtttttaattttgttttgaaaatgagagtaatgtttatagttattagtaagtaattaggatttagttgggttgatgtggttagatttggggatatttagttaggtagatgtataatagatttataatggaggttagcgaggaaacgttggatacgttttttatgattgagttgtgaggatttgatttatttgtgcggcggttattgtcgtgtagaaatggaagttgtatatgtaggttgaggttttttagttggatagtttagttcgagtgagttttaagaggataggggaggttggtttttattttttttttttgaattattagtaaatgatagatcgttaataatttgttaaatgttttttaaaatgaatgttttaagtcgggtgtagtggtttatatttgtaattttagtattttgggaggtcgaggcgggtggattgtttgaggttaggagttcgagattaatttggttaatatggtaaaattttatttttattaaaaatataaaaattagttaggtatggtggtaggtatttgtgattttagttatttaggaggttgagataggagaatcgtttgaattcgggaggtagaggttgtagtgagttaagattacgttattgtattttagtttgggtgatagagagagatttcgttttaaaaaaaaaaaaaaaaaaaaaaaaaaattacgttttaaatatatgattttttattattgttgaattttttttttatgagtttaggagggttttttagagaggaaagtttttaggtttttttttttttttgtaaattttttgttttgaaggattagaaggattgtgttgttcgttgtattttttgtaagttttaaattttgattttagttgtgtttaggggtttttgtaaattttttttaggtgttaattattttttattttattttttgtttattaatttagttttttgttttagtgtgtttgaattttttgaattgatcgttgtttgatttttattttttaattgaattaggggagttgggtttttggaaatttaggtgtcgggtgttgtagagtggttgaaagttgggatgtggtagattcgtggttatatttatgtatatatatatatttatatatttatatatgtatatatatatatatatttgtatttatatatttgtatatgtatagattatagttttttatattttttttagataggggttatttggtgttttggagagagtgtgaagtttggaagggaaagaggggggattaagttttatttttagttatgggattgagataagttatttttatttatttgcgttttgtttttttttttgtgaggtaagtatagagtttatgtttttttttttggatgggagtgatgtgaaatttgaagaggggtagagataagggtcgttaatggaagttttttgggtaaaaaggtttttttaattaggggtatagaggaggttttgggttgagaatttgatagtattttgtattggtaattagtcggagggattggaaatatttagatgtgtttgttttttttattaggtttaaagtttttcgagattttgtttttattatagtgttttagtttagattttttttttgagttttagattttgttggatttaatagttatttttatttttatttgtttggaattttttaaagaattttttttttaatagttttagtttttaatagttttagtttaaatatatgattttttttttttaaattagttttttatttttgtttttgtaggagatggaagttatgatatttgtttcgtttttgtttttattttatttatgtttaattaagtattaggtatgttaggtttattttttaaatttttttggaatttagttttttagtttttattattttaggtcgaagttaatgggttaattggtttttgtttttattttatttttattgtagttttgattttttgagtagtagttagggtttaatttatatttatattaagcgtttttttgattgagatatttttttgtattattatttttttattttgtttagttttgtttatttttagtgtttttattaataatttattcgtttttataggcgcgtttgggattttatgttttatgtttttataggattttttgtttgattttttattgtatttaggttagtttgtagttattaagtgattgagtaatgtttggtttttttagtagattgttagtttttagttattgtatttttagtatcgttgtgtgggagtattttataaacgtttattgagttagggatttagtagtttttattttttttttttgttggagaatgcgtgtattttgtaatttttagtttttgtgttatttaattatttttttttttttgtttagtttaggtgtggttttatttatattttattttgagtttaaatgttttttttttggaagatattaatgtttttgtttgttcgtgaggatttcgtgtttattacggttttttttaggtgagttaaagggattttttagtttattagttaggggaggtgggtagatattttggagaattttttggaaagtttaatttttatgtttcggataatagttgaaggaattagtgatgttaagtttaaagataaaattttttaggtgtttaagtttttgtaggtttgttgggagtagagggaatgttttgcggaattagaggaagaggggtttagggagaagaagggtatatttttggttgttatatgtgatttattttagatgaatttggaagtgaagggaagagagttaaatattaaagtaaatatttagtggattagatagtaatgtgttagattgttttggagataaaatatttttaatatatggttgatatttggtgggagattagaatattttaaagagagaatttaaggggagggggaggaggatttgagttagagtagaagtagaggatagggagatttgtttttggggatagtatttgtaagaaataaggttgaggggtttattttaatttttttattttgttgtaggtgttgtttatgatgaagatgagtagatggttattttagttggggttatagtgtattggatttatagtttttaatttcgtatttagtaggtatttttttgatgattcgatggttttttagagttagggatgggttaggatttatttttttggttattgttttgttgagaaattaataagtagtatttggtgttatattttggtttttagtgagttagtttatgaaagatgatagattttttaagttaggggtatgtaggaaatgggttttttgtagttatagaaatggggttgagggttggattaaggggattatttaggggaagttttatttttagaggattttggaaaggaggttgtaagtttttatgggttaagaatttagagtttagtagagatagtttatttttgttttaagatgtttggggttttggttggaagatttaaaggttaggaaattaggagttattaaaagcgtaattggggttagaggatttatttttaaggtggtaagttggttttttttatgtggttgtttgagtatttttatatggcggtttatatttttttaagtaagtaatgtaaaaggttaagaaagatgttgtaaagtatgttatgatttagttttagaaattatatattatttttgttattattagtaagaagtttagtttacgtttaggagaagaggaagtagatttttttttttgaaatgaagaatattaagtaattcggggggtatatgaaagttattatatattatagggatttttttagagtatattttttatattattattgtagttttttaagatttaggggtaaagttttatttttttagtatttagtgaagattacgtttatttttttatttaattttttgttattttttattttttttgtttaatatttagtgttattttttagaatatattaatagtttttttagttttgtgtttttgtttaggttgttttttttgtttggtttatttgtttttttttttgtttcgttaaaatgttttttattttttaagatttagttttagagttatttttaattttttatttattagttttttttttaagtttgtgttttataatttttttgttttttttagggtattttttattttttgggttatagttgttaggagttaggtagggtaggggtcgggtggtgttttttttgtgtttttgtatttagggtagagtttagtatagagtagacgtttaaaaaatatttaaaggatagaagtattgatttgtgggttttttagtttggttttaggatgttagttagttgtttttagaagtaaacggattttttttgggaaattttagaggtgatgattagtatttttttcgtgattcgtagtttagttttttttttatgagtttgattattagtggattttttagaaagagtttttttttttttttttatttatagtatagggtattgggaaaatgtttaatgagttttgttttttgggttgtgttttggattttttagtgtgttttcgtatttattttttagtttgaatgttgtaatagttatgaaaaaagaaatgtaaagcgatttaggatgagagtaatattttattttaaagaaggtaaaatagaagtttagagaggttaagtattttgtttaagattatatagttaggagtggaatttatggttgtttaagttttacgtttttgttgaaggtagagatgaattatagtaataagtttagaaaggtgtttgttttatggtttgtgagttttgtttaagaatgaaagaggagttagtgggttaaagatgaggttattaataaacggtggtgttggagtttattattggttattttaatgggtttgtaagaattgttaattattaatgtttattgagtttagtgtagtgtttggggtattttgtatattgtttttgatttttattataattttgagaggtagtttttttaatttttattttataggtgaggttattgtggtttaaggacgttaagtaatttttttagcgttatacggtttataagtaaggtagttaggatgtgaatttagtaggattatttggttgtaaagtttttattttttttcgttatttgtattttttaattatttttagtgttttgttgatagaaggtacggaaatacgatgttatagattgtttaggaagatagaaattaggtagatgggttggttatggtttttaagttagattggaatttttaggtttggaatgatattatttttttttttttaataaattaatttatttattatacggttttgagaggtttaaaggtgattaatttttttgggagggtttcggttgataaggaaggaatgtgaatttttttattacggaagttttaaggaggttaagggtttaatatttgagattgttagtgttgttggtggatattggttaaggaaatattttagtggagtttcgagatgaagaatatgaggttttcgtttagatttaaggattagagggggttttgtaagatttaggggagttaggtgtattggagcgcgggttgtagaaaatagtttgagttttatttcggtttttttttgttttggttggttgtttttaatttttgtttttttttggattagtttttgttttttttttgtgattttgaggggtaatagttttttttttatttttttttagt

SEQ ID NO: 2048 - DNA, 8297 bp, Artificial Sequence
  chemically treated genomic DNA (Homo sapiens)
gttgaaagaaagtggaaaagaggttgttattttttagggttataagggaaggataaaaattggtttagaaggagataggggttaaggataattagttagggtaaggagaagtcgaggtggagtttaggttgttttttgtagttcgcgttttagtgtatttgatttttttgggttttatagagttttttttgatttttggatttaaacgggggttttatgttttttatttcgaggttttattgggatatttttttggttagtatttattaatagtattaataattttaagtgttggatttttgatttttttgaagttttcgtgatgggaggatttatattttttttttattaatcggggtttttttaagggagttggttatttttgagttttttaaagtcgtgtggtgggtgagttaatttattaaaagagaaaaaatgatattattttagatttggagattttagtttggtttggagattatggttagtttatttgtttagtttttgtttttttggatagtttgtggtatcgtattttcgtattttttattagtaaagtattgaagatgattggaggatatagatggcgagggagggtggggattttgtagttagatagttttattgggtttatattttggttgttttatttataagtcgtgtgacgttggggaagttatttaacgtttttgaattataatgattttatttgtaaaatgggagttaaaaaaattattttttagggttgtgatagggattagagataatgtgtaaaatgttttaagtattgtattaggtttaataaatattagtaattaataatttttgtaaatttattaaaataattagtggtaaattttaatattatcgtttgttggtgattttatttttaatttattggttttttttttatttttaggtaagatttatagattatagggtaggtatttttttagatttgttgttgtaatttatttttatttttagtagaggcgtggggtttggatagttatgagttttatttttagttgtgtggttttgggtaaaatgtttgatttttttgagtttttattttgttttttttggagtagggtattgtttttattttgaatcgttttgtatttttttttttatggttgttgtaatatttaagttgaagagtggatgcgaagatatattgaaaagtttaaagtataatttagagggtaggatttattgggtatttttttagtgttttgtgttgtgggtgagagaaggaaaaggggttttttttggaaggtttattgatagttaggtttatggaggaagagttgaattacgagttacgggagagatattgattattatttttgggattttttaggaaaagttcgtttgtttttaggagtagttggttggtattttggagttagattgggggatttataaattaatgtttttattttttaaatgttttttgagcgtttgttttgtgttgagttttgttttgagtgtaagaatataaagaagatattattcggtttttgttttgtttgatttttgataattgtggtttagagggtggagggtgttttggagggagtaggggggttgtgggatatagatttggagagggggttggtgggtaaggggttggaggtgattttagagttgggttttgaaggataagaagtattttgacgggataagaaggaggataagtggattaggtagggggaatagtttgagtagaggtatagaattggggaagttgttggtatgttttggaaagtgatattagatgttggataggagaggtgggaagtagtaagaggttgagtgagggagtaagcgtggtttttattgggtgttaaggaagtgaggttttgtttttgagttttaaggaattatagtgatggtataagaagtatgttttaaaaagatttttgtggtgtgtggtggtttttatatgtttttcgaattatttgatattttttattttaaaaggaggaatttgttttttttttttttggacgtgggttggattttttattaatggtggtagggatggtgtgtgatttttgaggttaggttataatatgttttgtagtattttttttggttttttgtattgtttatttggaaggatgtgagtcgttatgtgaggatatttaagtagttatatggggggaattaatttgttattttgaaagtggattttttggttttagttacgtttttggtggtttttggttttttagtttttgaattttttaattaaggttttagatattttggaatagagataagttgtttttattgggttttgaatttttgatttatgaaaatttgtagttttttttttagagttttttgaaggtaagattttttttgggtagtttttttggtttaatttttaattttatttttgtagttatagaaaatttattttttgtatatttttggtttggagagtttgttattttttatgagttaatttattagagattaaagtatagtattagatgttgtttattaattttttagtaagatagtagttaaggggatggattttggtttatttttggttttgagaagttatcggattattagaaagatgtttgttgagtgcggaattggaaattataggtttagtgtattgtggttttagttgagatggttatttgtttatttttattataggtagtatttgtagtagggtggagaggttggagtggattttttagttttgttttttgtaaatgttgtttttaagaatagatttttttattttttgtttttattttggtttaggtttttttttttttttttttaaattttttttttagggtgttttgattttttattaaatgttagttatgtgttggagatattttgtttttaaggtaatttggtatattgttgtttgatttattgggtatttattttaatgtttaatttttttttttttatttttaagtttatttgggatagattatatatgataattaggaatgtgttttttttttttttgagtttttttttttttagtttcgtagaatattttttttgtttttaataggtttatagggatttggatatttgagaggttttgtttttgggtttaatattattggtttttttaattgttgttcggggtatgagagttgagttttttagggagttttttagggtgtttgtttattttttttaattagtgaattgaggaatttttttgatttatttgaaagaggtcgtggtgggtacggagtttttacgaatagatagaaatattgatattttttagggagagaatatttggatttagagtgggatgtgagtgaggttatatttgggttgaatagagaagaaaagatggttagatggtataggggttggggattgtaaaatatacgtattttttagtagggaggagaaatggagattgttgagtttttgatttaatggacgtttgtgaagtgtttttatatagcggtgttagggatataatggttaggagttgatagtttattggagaagttagatattgtttagttatttaataattgtaaattgatttgagtatagtgaaaaattaagtaaaaggttttgtgagagtatagaatatggggttttaaacgcgtttgtgagggcgagtggattattgatgagaatattgagggtgagtagaattaaatagggtggagggatgatggtgtaggaggatattttagttaggaaggcgtttggtgtgaatatggattaggttttggttgttgtttaggaagttaggattgtagtgggggtagagtggaagtaaggattagttagtttattagtttcgatttgggatgatggagattgagagattggattttagaggagtttagagggtaaatttgatatgtttagtgtttgattggatatggatggggtgaggataggggcgaggtaggtgttatggtttttattttttgtaaaggtagagatggggggttgatttagaggagaaaggttatgtgtttagattggaattgttaaaggttggaattgttaaaggggaggttttttggagaattttaggtaggtggggatggggatggttgttgggtttagtagggtttggagtttagaggaggggtttggattggagtattgtgatggagatagggtttcgagggattttgaatttaataagggagatagatatatttgagtatttttagttttttcggttggttattaatataaggtgttgttaagtttttagtttagggttttttttgtgtttttagttgaaagggtttttttgtttaaggggtttttattgacgatttttgtttttatttttttttaagttttatattatttttatttagggagggaggtatgggttttgtgtttgttttatagaggaggaaataaggcgtagatgggtgggggtgatttgttttagttttatggttagaggtggggtttaatttttttttttttttttttagattttatattttttttaggatattaagtgatttttgtttaggaagggtgtggaaagttgtggtttatgtatgtgtaagtgtgtgagtgtaggtgtgtgtgtgtgtgtgtatgtgtgggtatgtgggtgtgtgtgtgtgtatgaatgtagttacggatttgttatattttagtttttagttattttgtaatattcggtatttgggtttttagaagtttagtttttttaatttagttgggaggtggagattagataacggttagtttagggaatttaaatatattaaaataaaaagttgagttggtaaataggaaatgaagtgggaggtaattaatatttggaaaaggtttgtaggaatttttaagtatagttgggattagggtttggaatttgtaaaggatgtaacgagtagtatagtttttttgattttttaaggtagggagtttgtagagggaaaggaagatttaggagtttttttttttgagaggtttttttgggtttatagaaagaaaatttaatagtggtgagagattatgtgtttgaagcgtaatttttttttttttttttttttttttttgagacggagtttttttttgttatttaggttggagtataatggcgtaattttggtttattgtaatttttgtttttcgggtttaagcgatttttttgttttagttttttgagtagttgggattataggtgtttgttattatgtttggttaatttttgtatttttggtagagatgaggttttgttatgttggttaggttggtttcgaatttttgattttaaataatttattcgtttcggttttttaaagtgttgggattatagatgtgagttattgtattcggtttaaagtatttattttaaaaagtatttaataaattattgacggtttattatttgttggtgatttagaggggaagaatgaagattagttttttttgtttttttggggtttattcgggttgaattgtttagttgagaagttttagtttgtatgtatagtttttatttttatacgatagtgatcgtcgtatagataagttaggtttttatagtttagttatgggggacgtgtttagcgttttttcgttggtttttattatgggtttgttgtgtatttatttggttgggtgtttttagatttggttatattagtttagttggattttaattgtttgttagtggttgtaaatattgtttttatttttaaaataaagttgagggtttttttttttaattttttttcgaagtttagagggtaggcgggttgaggaattgggagaatttgggagtttgaagtttattgagttgttttttttatttgttttagaggcgtgttttgggtgaggatttttgttagggagttgttgtgttttgttttaggttattttttggttttttttttgtggtttttgtttgggagttttgatgggtattacggagttttttgtttttcggtttttttttgggtttggttagtgggagttttagtaggagtttgagggagggtgagagggaggatggggtgttgttggttttttttttgggggtttttatgttggttagatttggagtagagtttattgtttttattaggggtttgatcgcgaggggggaaggaggtagggagggtgttgaggttttgtcgtattagttttgaggtatttagggtgttgtttgtttttcgtagaattttaatatgttgtttatagtattgtaaagaaacgttttattaatattttttttttattatttaattggaatgtgtttttttttttttattgagattttgatgaatgtattttgggaatataaagttaggcggggagggggtgttttaggtgggtcgttgtttgtgggatttttatttttttggattatagtttttttgtttatagagttaggagggtggatttatgtgttttatagatatagatttttagagttggggataggtgatgattttgtttttgggttttttttttgattttttaaatagatgttttagagggaatatttaatattttgatttatttatttttttttttttttagaattttatttaagaagatttattgtaaaaatattttttttatttattcgtatagatatcgtgggtttgggttgttagaaattaattttatttgagttttggagatagtttgttttggttttttaggaatttatattttagggtttttgaagtagtggtttttacgaaatatatagtgttattgttttaagggttaattgtgttttatgtggggttcgcgattttgtagttaatgatttagggtacgttattttaaaatgtggtagtttcgtatgttgaatattttaagtggaaagaatttaagaaatagtaggcgtagaaggattatgtgattgttttttgaagtaggatattagattttatagttagaggaaaggggtatcgtttatttcgagtattggggatattgagaggagtttcgataggttttgttgtttttttagttttttgtatttcgttcgtgttttttggttttattatagttttatgattttttattgtttatgatatttaatggaaatatttaggtcggttatagtggtttatgtttgtgattttagtattttgggaggttgaggtaggcggatcgtttgagtttaggagtgggagattagtttggttaatatagtcgagattgtgtttataaaaagtattaaaaaattaggtgagcgtggtggtatatatttgtagttttggttttaattatttgggaggttgaggtgggaggattagttgagttcggggtgatcgaggttgtagtgagtcgtatcgtattattgtattttagtttgggttatagagcgagattttgttttaaaaaaataaaaaggtatttaggtttaattattttatttttttatgaaggtttttatgttatattaaatttatattaaattaatttgtttattttttttttgtttatttgttttttgttttagggtttttaattaagaattcggaagtggagaaggaaaagatatttttttttcggatgttaatttgtgtttcgtattttttgattgtacgttagagttgggaagtattttttagtaagggaagtagtttggtttggtaaataattttgaattgaataatttagtcgttttttttgattaggttaataagaacgttttagcgtggtgttcgtgtattttaacgtttttttatgtgcgtaatttttttttttaatagattgagtaggtttagagttttggttggttttcgaatttatttaggttttaatagtattgtttatattttattgtttttattttgtatagttattattttttttatgataagtgatatttattttttatttaaattggtgatatgaagttgtagtttaaaagtaagttattattaaagaaatggttgtataggtgatatggatgtggtaaaaattgtgaacgtgaatgttaatggttaagtgtgggaaatatagtttgaaagtttttagttggaaacgtgtattacggacgggaagttagtttggcggttaggtcgatgggttttggaagttgattgtgaattgagtttttttttttagagttcgttatttaattttattgtatttcgttttttttaattatatagtggggattggtattttaaatagttttattttttagggtgttgtgtggagtagacgagttcgtgtgtgttagatgtatggagtacgtggttaatgtgttcgagaatataagttgttttttttgtattagtttaggaggttcgtttgttttagttata

SEQ ID NO: 2049 - DNA, 8876 bp, Artificial Sequence
  chemically treated genomic DNA (Homo sapiens)
ggttttgggaatagttttaagaggttttgaggaagtatgtttgaagtaggtaggttatagtttggttttatatatttttaggagaaaagagttataggcgaagatataaatcgatatatggaaagtatatattgatttagtttaaaaaagtaggatatttttaagtagggatttagtagttataggtgggttttaaggattttttagttgataattggttgagagggttaagttattgtttaaaggtttaaagttaatagtaagtaatgtttgagttaaaggaggttgtggggtttaaggtttttgttacgttgatgaatttttataggtagtagtttttcgagagaattaatggtaaacgtttgtttttttgtagatttttgagatgttagatttttagtttaattttgttagaattgggaaaagtttagaaagggaaggtttggttgtattaatggagattatttatagatgtaaattttatttataaaagatagttttgtagggttattttaaaatatgttaaataaatatattttgaggtaaaatatttttattttttatagggtttgttatttgttatgtgatgttatattagagttaggttgaaaagtaaattatattatagtaggtttatttttatttatttatttattttgaggtagcgttttgttttcgttgtttaggttggagtgtaatggtacgattttggtttattgtaatttttgttttttaggtttaagtaattttgttgttttagttttttgagtagttgggattataggtatttgttattatatttagttaatttttgtatttttagtagagatgaggttttattatattggttagattggttttgaatttttgattttaggtgatttgtttgttttagttttttaaagtgttgggattataggagtgagttattacgttcggattatattaggttaatttttaaaatttatttaatgatattttatggtttgtagggtgtgattttttgtatgaatggtttgaggttttgtttataatttggtattttattgttatagagtttgttttgttcgttttatgatattttaatttgaatgttggttagttgtgtttaaattttaaagggagggggtataataaggtatgtttaatttttttttttattacggttaggaatttaatttttaagatgtttttggggtttttttggttaagtgggagtttatttagttaatagggggtaagttgggggtgtttagtattttatgtttagtttatatattttagtttttgtgttttgattgttatttaaatagatttaggattttagattattttagttagttagtggtgaagttagttatgatttgggtttttttttttggagtatagaatttttttttgttttaaggtttgtttaaatgtattgttagaattttaggcgtttgtagaattttgttttgtgttatgttttattatgacggggtagtattgatttttagtgtaaagttttatatttattttgtttttttttttttaagtatacggatttttttttttgttgtgtagtttgtggttggaggaggggtggtataggtaatatagggagatttttttttttatttttattttatttttaatgtttttttttttattattacggtaaaagtaggtattgtgattatttatttgattttatggtttttatgaaggtgttgttttgcgtggatagttgttttatttggtgtttttgtgtggagaattatttcggggggggttttatttagttattttgttttattttcgttttttttttagttagtttttaaattgttggtatcgaagtttttagtgttttttttttttatattttatggagagttattgaagtagttttttttggattttagttggttttttagtagagttttttttttaaaggattaaaacgtgagattgcgggtttgagttaaaaagtagttagagggataaatattgggttttatttagaataatttatttgtttagtgttagtttattatttttgaataaaatttgtatgattttcgtgtttttatttagaataatttaattttgaggagacgtttttgtttttttattggtttttggatatggaataggtatatgaaaattatttggggtagttatgggttatattattttttttattttagttagttagtaggtatttgaagttcgtaatttgatgggttgaatttttgaaaataataataaatataatgttatttattttttattttttaaatttataatttattaatatatttttttgtaagttgtttgattttgaaaattatatatgataaaatttttttattatatataaaaaagagttttgtagtttgtattaatagaaaattggtgtttagatatattttattaagtaagtataaaataattaaagaatatttatttgaaagatataaaattattattttgttaggagtattttggtgttaaggtgattttagggaataattaggtaatttagttttttggtcggagtgaagaatggaatgttgaggttggagaattaagtagggtttaagaggggtttggtgtattaggttaggttatttgggtttaattatgaggggataattgaggtagtattagtaggaaggttaggtgattattaaattttttgttagatttgagtttttttttttttagaaatgtagtatttgtataaaaatgaaaggtttattaaaggttatattttaaattataaagaaaaaaaattattttttttttttttttttttttttgagatggagtttggttttgttgtttaggttggagtgcggtggcgtgatttgtgtttaatttttattttttaggtttaagtgaattttttgttttagttttttaagtagttgggattataggtattcgttattacgtttggttaatttttgtatttttagtagaggcgggttttcgttatgttggttaggttggttttgaatttttgattttaggtgatttatttatttcggttttttaaagatttgggattataggtgtgagttagcgtgtttagttttaaaagtttatttgtgagttatatttagaaggtagataaaaaattttgattaaatatagtttagaatttataaattgttaaattttagttttgttgagaatttttgagatttattattttttaaatgttttttattagagaaataggataatggtttgtaaatattggttattagtatttattttatagtttaagtaaataaatttatttgtatttaaaatataaatattatttattttgatttgagtgttgttgtttttttttaaattttattttttaaaaatgatggtaaaagtattgtttgttttaatttgatttattttttgtaatttagtttaattattttatagatttttttttgaaataaatgggttagatgattagataatagtggtaaatgtttgttattttaatgatatatgtaagagatatttttagtgaaatttgtatattaaatttttttttgtgttttttttttttttagtgaatttagtattaaagtgtttataaatatttttggtttattatttattaatttaaagtaaagaatgttaatgtgattataaatattttatttatatattataaatattttattatagaaatatgtttagagatatttgttttattattttaaagaagagtatatattatatattaaggtaaaaatagtattaaaaaagagaaggtagtaaataaaaaaattttaatgaatataaaatattataaaaattaatttaattaaaaattagttaggtatagtggtttatgtttgtaattttagtattttgggaggttaaggtgggtggattatttgaggttaggagttcgagattagtttggttaatacggtgaaattttatttttattaaaaatataaaaaattagttggatgtgatgggatatgtttgtagttttagttatttgggaggttgaggtaggagaatgttttgaatttgggaggtagaggttgttttgagttaagatagtgttattagattttagtttgggcgatagaaagagattttgtttttaaaaaaaaaaaaaaaagtataaagataaaattttagtatattgtgaattaattattagatttaattgttataggaagttttgtttttttggagtttttatattaaaattattaaaatttttattgaaaagtataatatgtgttttttttaaaagaaagatattttatatttgaataaagataaattttgaacgagtggtatatgttttaataaatattggagaatatttattttttaatatttagagaatgacgatagtattttttatatggcgtttttattgttagttataatttttttttatttagtgttttttagattgagatagattaaggaataattttttagattttttttgtagagttaggttatgtttagattatttgtagtattaaggatattgttatttaggttattaaaaaaagattattttgtgagttttgtttaaattaggttttttttaaaattattttagtgtgaaattgagtttaggtgggtttttattagtattagagtggatttgttagatgtatgtttgtagatgatgtaatattaaagtaaatgttttgggtaagagaagaaaggttaaagtaatgggtttattggtttttagttttgagttattttttatagtgttaaatttttattttagggtttttttatttgtattaataaaaataaattttttgggtgtaagtttttgtaaagtattttttatttgtatttttgggtatgaaagggtgttttagttttaattttagtttttttatttagaggtttatttttttgatattaataattaattagattatttgaattttttaagtttagtttatttaaaaggagattatttttaaaagtgttatattcgtggttttttgttatttttaattatgggttttttgggaatattttgttttttaatttttttggggaaaatttggggataggagtaaacgtaagtaaaataagttatttttattttttaatgtattttagttatgacgaatgaagagttaaatttaatagattttgttaatttgaaaataatttgttatttttgagaatagtaagtgaatagtattatttttgaatgagaaagttatggaagtattttgatttgatgagtagttaataatatgatagtttttatggaattgttatttattaaaatttacgttaagtgattatttaaatttttttttaaaaaagtataaaagaaattttagataataaatttttttgatattttttgtttattttaatttggtgtttagttttttttgtgttttttatagattatatatagttaaattagggttatttaggagttaatttaatattgtgatttgaaaatttgttgttgtagtgatttttattatatatttatgagttgattttttataatttttagtgttattattgagataatatgtattttaagtaatgttttaaaaataatgattttatatttagaaatattttaatattgaaaagtaattgtagattatttaattaaatttatttattttatatatgagaataagtttagataagggaagtgattgattaaaggttatagttttagagagagagaaataggatttttattaaggttttttgtttattattttaattttttttattttgttataaatgtatatatgtaaatatattatatataaatatatatttaggatgttatttttttttagtattttcgtatttttgatttgtgatttttttatatggttataagtatttaattattttagtattttgtttttattttttttgaaagacgagtagttaaggtttagagagattgaaattaagtgattttaaattggtggtagaattagggttaggatttgggttttatgatttttgtttagatttattttgaattttttttattagtttttaataaaaattatttttttattttttttgaagaagttagagtgtattatttataatatggtaattaattattttaattaattggttgattgattgatttaataaatatttattgagtatttaaatatatgataggtattgtagatatagtaaacggtaagataatttttagagtttgtattttagtgggagaagtaagtaatgaatgaatgaattaatgaaagaatgtgtaaggttaggtaggtagtattatgaagaaaaaaataaagtagagtatgagaattaaaaaataattatggggtattattttaaaatgtggttaggaaaggtttttttaaggaggttgtatttaaatagagtttgaaggaagtgaggaagtaaattatgtaaatatttgaggaaagagtattttagatagaggttaaaataatatttttgtttttttgtaagtttttgtttttttgtagtaattgaaagataaagaaaattatgaaattatttatatggatagattatgttattgataagttaataagaattaaaatttttataaagggtggttttagaatatttttttaggggtttttaaatattatgtatttttgtttgacggttattattatatagattagtagtttttaattattttggtattagggataggttttgtggaagataatgtttttatggattaggattggggtggggatggttttagaatgaaattgttttattttagattattaggtattatatttttataaggagtttgtaatttagatttttcgtatgtgcggtttataatagagtttatgtttttaggagaatttaatgttattattgatttgataggaggtagagtttaggtggtaatgtttttttgttttattgtttattttttgttgtgtagtttggtttttaataagttatggattggtatttgtttatggtttaggggttggggatttttattatatataatttaaaattaaagtaatattaaatttaaaaatataaagtttttataaatattgaaattaaagtagttttatatttttaaatttttttaattataaaattttttataaattttatttagtataatagttgaaaatgttaattttggaaacgggttgtttaggttcgatttttaattttataatttgtgaattatagaatttataaattttatatgtgtggttttgggaaaattaattagtagtttttttattttaaaattggagtaatagttttttatagagtggttgtaatgatataatgagtttatataaataaagtatttagaatagtgttttattatagggtaaaattttagtaaatatattttattattataaaaattgaattttttttattttttgttattttttattaggtatgtggggaaggggaatttagatgatggttggaaatttggaaattttttttttttttttgtaatttgtttgtaagtggatttaaattaattgtaatgtaggataattgttagatgttttaaaggatttaattgttgataaattaattttattgttattaaaaattttttgtttttattagatttttaaaatgttataatgttggtagaagtttggaataattttgttaggtggggtggtgggtgttttttaagtttgttgggttatttgaattagtcgattattatgtttttttgggttaaaatattttttttttttatgtaatagcgtatgtagttttcgttatttaaattagatatttttgtgatatatatttagtaatttagtttatatttgtaagtttttaaataaaataatttttaaaaattatttaaaagtatgtatagatttatttttattattgtataaattatatgaaaagtaaaaataagagaatagtttatggttgtgaataatatataaatttgattttaattgtatatataataattgagaatttatataaaggttttttttatttatttataaatcgtataattttagttaagttagttttttattatttgtaaagtacgaataatgatagtattagtattattggtttattgtaaaaattaataagagttgtatgtaaagtgttgatatagtttttgatatgtggtaagtatttaattattattattgtttgaagatgatgatttgtttttaaaggattattattattatttttatttttaaatgtattttttagtttatttatattttatttttttcgttattcgtttattagtataatatagtatttttaagattattttttttaaattaatttagtgagattaataaattttaatatgtattgagtattaagagtgttagatttttttatatatatgtttttatttaatttttattagagtttggtaaagaaggcgattatttttatagtaagttattttagttttagaaagatttagtgattttattacggttatttagttagtagatgttatagttggaatttaattattgtttttttttttattgagtaaaaaatattgattttatttatatgttttggttaatatgattaaaagttttttttggttgtagtagttaagagaaagtgttgttattattttaattttttaaatgtaaattaaatttttagttttttaggttttaattttaaattatttggaaattatgttgaagttatggtgggttataagtatattttgatttattagtattatttttaagtgaggaaatatatgtattttaaatggaattttttaagtgagagaaaaaaattaaaagtaaaagaaaatatgttatataaagatattgagttttattttttttttttttaataga

SEQ ID NO: 2050 - DNA, 8876 bp, Artificial Sequence
  chemically treated genomic DNA (Homo sapiens)
tttgttgaaaaaggaaaagataaggtttaatgtttttatatgatatatttttttttatttttgattttttttttttatttgagagattttatttaaaatatatatatttttttatttaaaaatgatattaataagttaaaatgtatttgtgatttattataattttagtataatttttaagtagtttggaattaagatttgagaagttggaggtttagtttatatttagaaagttaaggtgatagtagtatttttttttagttattgtagttaaggaagatttttaattatgttgattagaatatgtaaatggggttaatattttttgtttaatgaagaaaaaagtagtgattgaattttagttgtggtatttgttggttgagtgatcgtggtaaagttattaagtttttttgaggttaaaataatttattgtgaaaataatcgttttttttattaggttttggtaaagattaaataagaatatatatatgaaaaggtttagtatttttagtatttaatatatgttaagatttattaattttattaaattagtttaaagggagtgattttagaaatattatgttatattagtaaacggataacggaaaggatagaatatgagtgagttgggaagtgtatttggaaatggaaatagtgatgatggttttttaagagtaaattattatttttaaataataatggtaattaagtatttgttatatattagaggttgtattagtattttatatatagtttttgttaatttttataataagttaatgatgttggtattattattattcgtattttgtaagtggtaaaaggttaatttggttaaggttatacggtttgtaagtaaatgggggaggtttttatatgagtttttagttgttatgtgtatagttgaggttaagtttatatgttatttataattatagattgtttttttatttttattttttatgtgatttatataataatggaagtgagtttatatatgtttttgagtgatttttaaaaattattttatttaaaaatttataaatataaattggattattaagtgtatattataagagtatttaatttgaatagcgagaattatatacgttattatataggaaaaaaaagtgttttaatttaaaagggtatagtgatcgattaatttaagtggtttaataagtttggagggtatttattattttatttggtagaattattttaggtttttgttaatattgtgatattttaagagtttggtaaaagtaggaagtttttagtaataatggaattaatttattagtaattaaattttttaaagtatttgatagttattttgtattataattaatttggatttatttataggtaaattataaaagagaggaaagaatttttagatttttaattattatttgaattttttttttttatatgtttagtaggagatggtagaaaatgagaggagtttagtttttatgataataagatatatttattgaaattttgttttgtgataaggtattattttgaatattttatttgtataaatttattgtgttattataattattttgtgaggaattattattttaattttaaggtgaagaaattgttaattaatttttttaaggttatatatataggatttatgaattttataatttataaattatagaattagaaatcgaatttgagtagttcgtttttagaattaatatttttaattgttgtattaaatggaatttataaagagttttgtaattagaaaaatttagggatataaagttattttaattttagtatttatagaagttttatgtttttaagtttagtattgttttaattttgaattgtgtatggtaggggtttttaatttttgggttatggataaatattagtttatggtttgttaggaattaggttatatagtaggaggtgagtagtggggtaaaggagtattattatttgagttttgttttttgttagattagtggtggtattagatttttttaggagtatgaattttattgtgaatcgtatatgcgagggatttagattgtaagttttttatgagaatataatgtttgatgatttgaagtggaatagttttattttgaaattatttttattttaattttggtttatggaaatattgttttttataaaatttgtttttagtgttaaaatggttggggattgttggtttatgtgatggtagtcgttaagtaaaaatatatagtgtttagaagtttttaaaagaatattttggaattattttttataaagattttggtttttattgatttattagtagtataatttatttatataaataattttatagttttttttgttttttaattgttgtagaggagtaggagtttgtagagaggtaagaatgttattttggtttttatttggaatgttttttttttaaatatttgtatggtttgtttttttattttttttaggttttgtttgagtgtagtttttttaagagaattttttttggttatattttaaaatagtgttttataattattttttaatttttatattttgttttatttttttttttataatattatttatttgattttatatatttttttattggtttatttatttattatttgttttttttattagaatgtaagttttaggaattgttttatcgtttgttatatttgtagtgtttattatatgtttagatgtttaataaatatttgttgaattaattaattaattaattaattaaagtgattgattgttatgttgtaaatggtatattttgatttttttagagaaagtgaggaaataatttttattaagggttagtagaaagaatttagaataagtttggataagaattatggaatttaggttttagttttagttttgttattaatttgaagttatttaattttagtttttttaagttttagttgttcgttttttaaaaagaataaaggtaggatgttaaggtagttgagtgtttgtggttatgtaaaaagattatagattagaaatacgagggtgttaaaaaagaatgatattttaagtatgtgtttatatataatatatttatatgtatatatttatgataaaatgaaaaaaattgaagtgataaataggagattttaataaaaattttgtttttttttttttagaattgtgatttttggttagttattttttttatttggatttatttttatatataaaatgaataggtttgattagatgatttgtagttattttttagtattaaaatatttttagatataagattattatttttaaaatattatttaaaatgtatattattttaataatgatattaaaaattgtgaaaagttagtttataaatgtatggtagaagttattataataatagatttttagattatagtattagattgatttttaaataattttggtttaattgtgtatagtttatgaaaaatataaagaaaattaaatattaagttaaaataagtaaaaaatgttaagaaagtttattatttggagttttttttgtgtttttttgaagaggaatttgaataattatttaacgtaaattttaataaataataattttataaaagttgttatgttgttagttatttattaaattaaaatgtttttatgatttttttatttagagatgatattatttatttgttgtttttagaagtagtaagttatttttaagttaatagaatttgttaaatttaattttttattcgttataattaagatgtattgaaaaatgaagatagtttgttttatttacgtttgtttttgtttttaggttttttttaggaagattaaaaaataaagtatttttaaaaggtttatggttggaggtagtaggaaattacggatataatatttttgaggatagtttttttttaaataaattgaatttgaagaatttagataatttggttaattattaatgttagaaaggtgaatttttaagtgggaaaattagaattggaattaaaatatttttttatgtttaggaatatagatagggagtattttataggaatttatatttagggaatttatttttattaatataaataaagggattttaaaatgggaatttggtattatgaagagtggtttaaagttagaaattagtaagtttattgttttggtttttttttttttgtttagggtatttgttttgatgttgtattatttgtaagtatatatttggtaggtttattttaatattgatgaagatttatttggatttagttttatattgaaatgattttagaaggggtttggtttagatagggtttataagatgatttttttttggtgatttgaatggtagtgtttttggtgttgtaaatggtttgagtataatttagttttgtaaaggaggtttagggaattgttttttggtttgttttagtttagagaatattaggtggaggaaagttgtgattggtaatgaaaacgttatgtggaggatgttgtcgttattttttaagtattggagaatagatattttttaatatttattaaggtatatattattcgtttaaagtttgtttttatttagatatagaatattttttttttaaagaaaatatatgttatattttttagtgaggattttaataattttaatataagagttttagaaaaataaagttttttataataattgagtttagtaattaatttataatatattaaaattttatttttatatttttttttttttttttggagatagagtttttttttgtcgtttaggttggagtttagtggtattattttggtttagggtaatttttgttttttaggtttaaggtatttttttgttttagttttttaagtagttgggattataggtatgttttattatatttagttaattttttgtatttttagtagaggtagggttttatcgtgttggttaggttggtttcgaatttttgattttaggtgatttatttattttggttttttaaagtattgggattataggtatgagttattgtgtttggttgatttttaattaagttaatttttatgatgttttatgtttattagaatttttttatttattatttttttttttttagtattatttttattttaatatataatatgtatttttttttaaaataataaaatagatgtttttaaatatatttttataatgagatatttatgatatataaatgagatatttatggttatattggtattttttgttttgaattaataaataataaattaaaaatatttataaatattttaatgttgaatttattagggaaaaaaggagtataaagggaaatttgatatataaattttattaaaggtattttttgtatatgttattgaaatgataaatatttgttattattgtttgattatttagtttatttattttaaaagggaatttgtgaaatgattaagttgggttgtaaaagatgggttaagttaaaataaatagtatttttgttattatttttgggaaatgaaatttaagagagaataataatatttaaattaaggtaggtaatatttgtattttaagtgtaaataagtttgtttgtttgagttatagagtaaatattgataattaatatttgtaagttattgttttgtttttttggtagaaaatatttagagaatgatggattttaaagatttttaatagaattgaagtttaataatttatagattttaagttgtgtttagttaaaattttttatttattttttaaatgtggtttatagatgaatttttgaggttgggtacgttggtttatatttgtaattttagatttttgggaggtcgaggtgggtggattatttgaggttaagagtttaagattagtttggttaatatggcgaaaattcgtttttattaaaaatataaaaattagttaggcgtggtggcgggtgtttgtaattttagttatttgggaggttgaggtaggagatttatttgaatttgggaggtggaggttgagtatagattacgttatcgtattttagtttgagtaatagagttagattttattttagaaaaaaaaaaaaaaaaaaaagatgattttttttttttataatttaaaatgtgatttttggtaagttttttatttttatataaatattgtatttttaaaagagaagaaatttagatttggtagaaagtttggtggttatttgatttttttgttaatgttgttttaattgtttttttatgattgagtttaaatgatttagtttagtgtattaggttttttttgagttttgtttagttttttagttttaatattttattttttatttcggttaaggagttgaattatttgattattttttgaagttattttgatattaaggtgtttttagtaggataataattttgtattttttaaatggatattttttagttattttgtatttatttggtaaaatatgtttggatattaattttttattaatataaattatagaatttttttttatgtataataaaaagattttattatgtataatttttaaaattagatagtttatagggaggtatattaatgggttgtaaatttagagaataaaaaataagtgatattgtgtttgttattgtttttagaaatttagtttattagattgcgaattttaagtgtttgttggttggttagagtaagagaggtgatgtgatttatagttgttttaggtaatttttatgtgtttgttttatgtttagaggttagtggagaaatagaggcgtttttttagaattaaattattttaaatggagatacgggaattatataagttttgtttaagagtggtaggttggtattaggtaggtgggttattttaagtaaaatttagtatttgtttttttgattgttttttggtttaagttcgtagttttacgttttaattttttaggagaaaggttttattaaaaggttaattgaaatttaaaaagaattattttagtaattttttatgggatatagaggagaaaggtattggaggtttcggtgttagtagtttaaagattgattggagagagggcggaggtggagtaagatggttgaatagaatttttttcgagatagttttttatataggaatattaaatagaataattatttacgtaagatagtatttttataaaagttataaaattaggtgagtgattatagtgtttatttttatcgtaatgataaggaaagaggtattgaagatagggtgggggtaggggggaagatttttttgtattgtttatattattttttttttaattataggttgtatagtaggaaagagaattcgtgtgtttggaggagagagagtaaagtgagtgtgggattttgtattggaagttagtgttgtttcgttatggtggaatataatataggatagaattttgtaggcgtttagaattttgatagtgtatttaggtaggttttgggatagaggagaattttgtgttttagagggagaaatttaggttatggttagttttattattggttaattaaagtggtttgaggttttgagtttatttgagtggtagttaggatataaggattaaagtgtgtagattaaatataaaatgttaagtatttttaatttgttttttattgattgaatgaatttttatttggttaaagagattttagaaatattttaaaaattgaatttttggtcgtgatgggaagggaggttagatatgttttgttatattttttttttttggagtttaggtataattgattagtatttaagttaaaatattataagacggataaaatagattttgtggtaataagatattaaattataaataagattttaggttatttatgtaaggaattatattttataaattataaaatattattaaatgagttttaaaagttaatttggtatagttcgggcgtggtggtttatttttgtaattttagtattttgggaggttgaggtaggtagattatttgaggttaggagtttaagattagtttggttaatatggtgaaattttatttttattaaaaatataaaaattagttgggtgtggtgataggtgtttgtaattttagttatttaggaggttgaggtagtagaattgtttgaatttgggaggtagaggttgtagtgagttaagatcgtgttattgtattttagtttgggtaacgagagtaaaacgttgttttaaaataaataaataaataaaaataaatttgttgtaatatggtttgttttttaatttgattttgatatagtattatatgatagatagtagattttgtagggaataaaaatattttattttaaaatatatttatttgatatattttgaaatggttttgtaaagttattttttgtgagtgagatttgtatttgtagataatttttattaatgtaattaggttttttttttttaggttttttttagttttggtagagttgaattgagagtttgatattttaaaggtttgtaaagagatagacgtttgttattgattttttcggagggttgttatttatgaggatttattaacgtaataagaattttggattttataattttttttaatttaagtattatttattattgattttaagtttttagataatagtttaatttttttaattaattgttaattgaagaatttttaagatttatttataattattaagtttttgtttggagatgttttgtttttttgggttgaattaatatatattttttatgtatcgatttatgttttcgtttgtaattttttttttttggaaatgtataaaattaaattataatttatttgttttaggtatatttttttagaattttttaagattgtttttaagatt

SEQ ID NO: 2051 - DNA, 6062 bp, Artificial Sequence
  chemically treated genomic DNA (Homo sapiens)
gattttatagtttttgttattttattaatagtttgtttatttggtagtttattttaaagttatagaggaataaatattatgttgttatagattttttattattttggttggtttttagagtgataggtaagtttttggtttgtgtaaagtttgtttttagttattagtggttttttgtttattttgtagagttatttgtttttggggatagaagttgatagtggtatttatagtataggtttgttatgggtttagtagtttttgtggtattttttgttatattgggaaaatgaagaattttaggatatgggtttggagggcgtcggtggagttattttttttttgtgttgttttgggttgttttagtttgtttggttttaggtaagtgatagttattaataattttttgattaataatatgatagggaaggtgtagttatatgatgttgattatttttttgttgtatgtttattgaatgaggaacgttttttaaggtaatttgtatgtatttgataatatattattaataattttttttaaattattgtggaattaagtagttgattttaataaaagtttttgtaagaaattgataggtttaaatgtattttgttatgttgagaagaataggatattttttttgtattttgaataaagttttcgtgtgattttttatgaaaaagaaagtttgttatatatagaggataaaagagtaaatttatgaaatgattttaataaatgagattgatttattttatttgtttattaattttaaatttttagatttttaggtttttttttattttttttttatatatatatatatatatatatatatttttttttttttttttttttattttttataaggtttttagtagttaaatgttggttgatttattttattattgttagtttttattaataaggtgtaaaataagttaaagaaaatattttagtgggagtttaaatttgggttttagtgatagaagagttagtgacgtagtaatgtggggatgtttcgtgtgtatgagaaatttttgttatgagatgttgaagtgtgtatgtgttttcggtttttatgtaaatatttttgtgggaagagggattgtaattttattttttttatttagtttaaaaatgagatttgaataaattttttattttatgtgaggagtattttttatttatgggatatagtttttggttttagttttgttgagttgttattaggaattataggatgatgagtattcgtttattatttattggttatttaataagtaatagttattaggatgattaagaaattttatttagtttagagaataattaagttgttaagattttttttgtgtgtattgtgtgtatatagagaagtatttaggatttaagaaaatgttttcggaatggaggatttaagggaattatagtaattttatttatagtattgtgtttttgggtggagttttttgttgggttttgaggatatagagatgagtttatgtttttataaagaatgttaatatgtgagtatatgttatgtgtatcgttataaaagatgttacggggtagttaggaaataaggagggaatgattagttttatagggtatagggtttggaaaggtttttagaatagagagtgtgagggttgaatttttataggtgcgtgggtgtttgtcgaatggttaaggggttgaaaggtgtgttaggtagagggagtagtataggtaacggtgcgtgagtgtgagagagttggtttgtttttgaagtttttagatattttagtgggttttgaatataggtttcggtaggaagttgagagggatgagatagagtaggagtgaataggtattatgttatgggtagagttgggggatgttggagtattagttaaggaatttgaattatatttttattataatgtattgggaagttattgaagagttgaagtaaaggagtgatacgattaaatatatatattaggaagtttattttgaggtagggagtggaggggtaaattgttgattagagtgtagtttgagaaattgtatttaattgttattataatattatgaggtgggtgtaatttttttttttcgttatgtaagagaataaattgatttttagtgataagaaaagatttacgtatgtgtggtgaggtttttaaatttttatttgaatttgggtatagttttgatatttatttataatttttatggggttgttttgaatacgataggtatttgaattttatttgcgagtagaagaatagtttttggttttggaatagaaaatgttgagattattttcgtattggttaaaagagttttttgtttttatttatttttgtaattaagttagatgatgaaattataattattgtgtcgtaagatttattatgtattgttattttgtgttagtaatttggaaatattagttataatttttatagttattttaggtaagtgttattgtttatagttttatagagagggaaatagaaaatataagtgttttaaggttatttatttaataaatagttaattatggatttaaatttagttttatttaggttttagagtttttgtattttttttgtatttttttgttttttattaatgcgttgttttttttttattttttattattttttaatttttatattgtgtatttgatttgttggtttttgtgttgtttttttatttttgggttatatatttgttgttttgagatgttgttttaaattttatgtttattatagtaaacgatagagagaagagaaattgaaaatttgttatttagaagttgttttttttagtaaagaaaaaggatgttgtttgtaaaggggatgtagttgtttaataaattgtgtgtgataagaaagttgttgtgttagggtatttttatcgaaagttaaaatatattgacgtattttatttatataagttgatggtttgtaatttattgttgatttaattttgttgtattggatggatttatttttattttgattagagacgtttgttaggaaaagagtgggagatttgggtttagttaaatgtgttttaatgttggttatagtattttttgtatttttaggaaagatatttttttgttagtttttaagtagagggggtatatgtttaaggagttgagtaagggcgtttattgtagttttatttgtaatcgtaaaatattgggaaaatataaatgttttttaaaaagagaaggaataaattaaatgtaatgtgtgttatatgatagaatatttagataaaagaaatgaattagatttttttatgaattaatatggataattttagaaatgtaatgttgattaataaaagtgagttgtagaattatatgtgtaagtatgaataaagtatatataagtaatattatagatagtgtatagatattaaattatttaaaagagattggaaggaaatatattaaatttatggtaatagtttttttgggggtaaggtggggggagtaaaatcgaggttgttgtaaaatgtagatgttaaaattaaaaatttataaaaagatttgaagtaagtgtattaaagtgtgaataattgttaatttggatgtgagtatatgggtgtttattatattattttttgtatttttttaggtatgtttaattttttaatgttaaaagtatatagaggatttttaatgatagaagtttagttagttggttaaaatgtttattaggtttgtttttatagaaatttataggggtgaaaggtttatgttgtttttatatatagaggttttgagggaatttagaatttatgtggtttttcgttagttttaggaattaaagatgttgtttaattttagttttttttttagatttgtattttatagtattaataaattatatatattttattcgatgtaatttataaatatattatttatttagttggttattttattatattgttattttttataatgaaaattgggtgtaaaaatgagagatgtggtggatataattattttttattaagtttttttcgtaagtgattattttgtttattaataggtttttaaattttagagacgaaaataattgtgatttttaatagttagtgtgtatattatttatttgtttagttttatttatggttttggagttgttttggttgttaaaaatataatgtaatagttttgtagttgaaataggaagagggtattttgtagagttgttaaatatatatttaggagaagttaaattatagataatattgttttgttaaatttgggtaaattagtagataagaatatattttgaagttttttattggtgtgtagtattttgttttaagtaatcgttttaaagtatttatttgtggtttttagtagtttttgattttttattaaagatttagttttattaggtaattgatttttgttggtttttgtggcggttatggatatagattttatcgtagttaatattattttttttttaggatttttgttaattgagaatatattgttaatgattttgtcgggagtgatattttgtgtatatgagatggtgaaaattacgtgatgtttttttttttaatgatttaattttggatatggaaagaaagaggttttatatagatgttggaagagattattggagttagtgttggttttgtttttttttaggtagtatggggtaacggataaaattcgtatatattttagagtttaagagatttcggtttagatcgtaatattattgtatattagttgtatgatcgtggatgtgtttttgtttttttgggtcgttttttttatttgtttaggtggtagtgttttatagttgttttttagtattgttgtgaaaatagaagaagatagcgtgggtgatgttgggttattgagtatagttttgatatgtttgttataggtgtttagtaaatttttattttttttgtttttttatttttttttgtgttttggaaaggaatataaattataaagaattttatagtgtaatatatttttttaattgtaagaaaaaaataagaattattatatatattttatattatagaggaagaaattgaaggtttaggtaaattaaatagtatttttatttatttatttataatttaatgtgttttaggaaatgaattaaaagtattgttttatttttgttggtggtgttgaggtttttaagaataagtattttttatttatttttttttttaagaattattttttttttttttatagttttttatgattagatttgtatttagtataaattttttattttgagatttaagtttatataggaattatttattaaatgagttttcgtaggtgttttatggtatttggaatttagtatgttttattcgaaatttaagttttttttattaagatttattttttgttgtgttttttatcgtttatatatttaaatgggaaaatagtatttatttaaaaggtttttttttagtattttatttttattatttattattattttttatttattttatatgagaagtattttatatgttggttttttttattttttcgttttggttattgttatgatttaggtttatattatttagtgggattgttgttgttagttttttttttgtttttttattattaggtttttttgatttttattgggtttgtatagttttagttatggggtttgtatgttggaaatttttgttttttggataaagttttatagagttagggcgtgaggtatgttttttatagatatgtttttttagttataatgttaggtgtttattatatgtttaataaatatttgttggattaattaatttaaattaattaattaattaaggaatggaattaattaatattttattgttggattaaatatttgttggattaattaattaattttaggataggttattttggaatgataaattaatagttttgtataagtgagtaaatatatatttattgaatgtataaatagatggttggatgtatatttaatttttttttgatacgtgattttttttttttataatgatttttaga

SEQ ID NO: 2052 - DNA, 6062 bp, Artificial Sequence
  chemically treated genomic DNA (Homo sapiens)
tttaaaagttattatgagagaagagagttacgtattagaagggaattaagtatatatttaattatttatttgtatatttaataaatatatatttgtttatttgtgtaaggttattagtttattattttaggataatttattttggaattaattaattaatttaataaatatttaatttaataatgaaatattaattaattttattttttaattaattaattaatttaggttaattaatttaataaatatttattgaatatgtagtaagtatttaatattatggttagagaaatatatttgtgagaaatatgttttacgttttagttttatgggattttatttagagggtagggatttttagtatgtaggttttatggttggagttgtgtaggtttagtgggagttaggagagtttggtagtagggaaataaggaagaggttggtagtagtagttttattgagtggtataagtttgaattatggtaatggttagggcgagaggatggggagaattagtatatgagatgttttttatgtggaatggatagaaagtgatggtggatggtggaggtggggtgttaaaggaaggttttttaagtggatgttgtttttttatttgagtgtgtgggcggtgggaaatatagtagaaaataaattttgatggggaagatttgagtttcgggtggggtatgttgagttttaggtgttatgaaatatttacggagatttatttagtaaatagtttttatatgggtttggattttaggatgagagatttgtgttaggtatagatttgattatggaaagttatggaagaggaggagatggtttttgagaggagaagtgagtgaaggatatttatttttggaaattttagtattattagtagagataaggtaatgtttttggtttattttttggagtatattgggttatgagtggatgaatgaggatgttatttaatttgtttgggtttttagtttttttttttgtaatatgaagtgtgtatgatgatttttattttttttttataattgaaagggtgtattatattgtaagattttttgtaatttgtgtttttttttagggtataaaaagagatgggaagataaaaggaatggaggtttgttgagtatttatgatagatatgttaaggttgtgtttaatggtttagtattatttacgttatttttttttatttttatagtaatgttggaagatagttgtggagtattgttatttgggtagatgagggaagcggtttagagagatagggatatatttacggttatgtagttggtatgtagtggtgttacgatttgagtcgaggttttttaggttttagagtatatacgggttttgttcgttgttttatgttgtttggaaggaaatagggttagtattgattttaataattttttttaatatttatgtaaggtttttttttttttatatttaggattgagttattagggagaagagtattacgtagtttttattattttatatatataggatgttattttcgataaggttattaataatatgtttttaattggtaaaagttttaaaaagaggataatattaattacggtgaaatttgtgtttatgatcgttatagagattagtaaaaattaattgtttagtaaagttggatttttaatgaaaggttaaagattattggaaattataggtggatattttaaaacggttatttgaggtaggatgttatatattagtggggggttttagagtgtgtttttatttattaatttgtttaggtttgataaaataatattgtttgtgatttggttttttttaagtatgtatttgatagttttgtagggtattttttttttattttaattataaaattgttatattatgtttttagtaattaagataattttagggttataggtgagattgagtaggtaagtaatgtatatattagttattaagagttataattattttcgtttttgagatttgaaagtttgttaatgggtaagatgattatttacggaaagaatttggtaaaaagtagttatatttattatattttttatttttgtatttaatttttattatggaaggtggtaatataatgaagtaattagttgaataaatagtatgtttgtaaattatatcggatgagatgtgtgtggtttattagtattataaaatgtaaatttgaaagaaaggttaggattaaatagtatttttagtttttgggattaacgaggagttatataaattttaggtttttttagggtttttgtgtgtgggaataatatgagttttttatttttatggatttttatagaaataaatttgatggatattttgattaattgattaaatttttgttattaaaaattttttgtatgtttttaatattgaaaaattaagtatgtttagagaagtataagaaataatataataaatatttatgtatttatatttagattggtagttgtttatattttggtatatttgttttaagtttttttgtaaatttttaattttgatatttgtattttatagtagtttcgattttgttttttttattttatttttagaggggttattgttatgaatttggtgtgtttttttttagttttttttagataatttgatgtttatatattatttatagtattgtttgtgtgtgttttatttatatttatatatatgattttgtaatttatttttgttaattaatattgtatttttgaagttatttatgttgatttataaagagatttagtttattttttttgtttggatgttttattatatgatatatattgtatttaatttattttttttttttttgagggatatttatatttttttaatgttttgcgattgtaaatagagttatagtaaacgtttttgtttagttttttgaatatgtgttttttttatttaaggattggtaaggaggtgttttttttggggatgtagaaaatgttgtagttagtattaggatatatttaattgggtttaggttttttattttttttttaataggcgtttttgattaaaataaagatggatttatttagtatagtaggattgggttagtagtaaattgtaagttattagtttatatagatggggtgcgttaatatattttggttttcggtagaaatgttttgatataataatttttttgttatatataatttgttaagtagttgtattttttttgtaaatagtattttttttttttgttagaaggggtagtttttaggtggtaggtttttaattttttttttttttgtcgtttgttgtggtagatatgaaatttaaagtaatattttaaggtaataaatgtgtggtttagagatggagaaatagtatagaggttaataagttagatatataatgtggaggttggggggtggtggggggtggggaggggataacgtattagtgagaagtagaaggatgtagagagagtgtagggattttgagatttgaatgaaattggatttgaatttatagttagttgtttgttaagtggatagttttgggatatttatgttttttgtttttttttttgtgaaattgtaaatagtagtatttatttggaatagttgtgaggattatagttaatgtttttaagttgttggtatagagtggtaatatataataggttttacgatatagtgattgtgattttattatttgatttgattataagagtaagtaagaataaaaaatttttttggttaatacgaaggtggttttagtattttttgttttagaattaaagattatttttttattcgtagatggaatttaaatatttgtcgtgtttaagatagttttatggggattataggtggatgttagaattatatttagatttaggtaagggtttgaaaattttattatatatgcgtgaatttttttttgttattgaggattagtttgtttttttatatagcgagaaggagagattatatttattttatgatgttgtagtgataattaaatataattttttagattgtattttaattaataatttgtttttttattttttattttagagtgaattttttaatatatatatttgatcgtgttatttttttgttttaattttttaatggttttttaatgtattgtggtgaggatatagtttaagttttttagttggtattttagtattttttaattttgtttatgatatgatgtttgtttatttttattttattttattttttttaattttttgtcgggatttgtgtttaaggtttattgaggtgtttggaagttttaggagtaagttagtttttttatatttacgtatcgttgtttgtgttgttttttttatttggtatattttttaattttttagttattcggtaaatatttacgtatttgtagagatttagtttttatattttttgttttagaagtttttttaggttttatgttttgtagagttgattattttttttttgttttttggttgtttcgtagtattttttgtaacggtatatatagtatatgtttatatgttggtattttttgtgagaatataggtttatttttgtatttttagagtttaatagaaagttttatttaggggtataatgttatagatagggttgttatggtttttttaagttttttatttcggagatatttttttgggttttgaatgtttttttgtgtatatatagtatatataaggaaggttttggtagtttagttattttttgggttaaatggagttttttgattattttaatagttgttatttattgagtggttaatagatagtgaacgaatgtttattattttgtggtttttaatggtagtttaatagaattgagattagaggttgtgttttatgggtaggaggtattttttatataaagtgaaaggtttgtttagattttatttttggattaagtaaaaggaatggaattatagtttttttttttataggagtgtttatatggaggtcggggatatatgtatattttaatattttatggtaggggttttttatgtatacggagtatttttatattgttacgttattggtttttttattattggagtttaagtttgagtttttattaggatattttttttagtttgttttgtattttgttaatggagattaataatgatgaaataaattagttagtatttaattgttgggaattttgtggggggtgagagagagagagagagagagtgtgtgtgtgtgtgtgtgtgtgtgtaagaagggggtgggaaagaatttgagaatttgaagatttggggttgatgagtaggtagagtaggttaattttatttattaaaattattttatgaatttgtttttttgttttttgtatgtaataaatttttttttttataaagaattatacggaggttttgtttagaatatagaaaaaatattttattttttttagtatgataaaatatatttaaatttgttagttttttataggaatttttgttgaaattagttatttggttttataataatttgaaaagagttgttgatagtatgttattagatgtatgtaaattgttttaagagacgttttttatttaataggtatgtaataaagagatggttagtattatgtggttgtattttttttgttatattattgattagggaattattggtaattgttatttatttggagttaggtaaattgagatagtttagggtagtatagagaagaaatagttttatcggcgttttttaagtttatgttttggaattttttatttttttaatgtgataggagatgttatagaggttgttagatttataataagtttgtgttgtgagtgttattgttagtttttgtttttaagagtaaatagttttgtaaagtaaatagaaagttattagtgattggaaatagattttgtatagattaaaaatttatttgttattttggaaattaattagaataatgaaaaatttgtagtagtatggtgtttatttttttgtaattttagggtaagttgttaagtggataggttattagtgaggtggtaaggattgtgggatt

SEQ ID NO: 2053 - DNA, 10132 bp, Artificial Sequence
  chemically treated genomic DNA (Homo sapiens)
tatatgtaaggtaattggggtaggtaatgaggaaattaaaaaatgttattgttgtttttaacgagtataataagatggtaataattaatatttattgagttttttatatggtaggtagtattttgagttttttatagttatttaatttaattattataattattatataagggaaatatggaaattttatgtttttgttgtaggataagttattaagatagtgatttttgaaatattttatgtatataatgaatagtaaatggtttgagtaaaaatttttttttgatttcgtattttaatgatattaagatttgaattataggtatatgtagaagttattaaattagatttttttttttttaaataatagtatgagatgagttttttatatttattttttaagtatttattatatttattttaatatattagaagtggtgttttaatatattttaattttttttttattttaaggttgtttatttttaaaattataaggtttagaggaattataaaagataaagttatcgttttattaaatttgaaagtattgttaaagtaaattttttataatagttaattatttaaggaggagttaaattaaatttaatattgagtattttatggtattttgttggtatattgtttggttgttatttttggggtaggataatatgttttttttaggaaatattattatttagagatttttattattttgtgaatttttgtatggttttgtttttgaattagttttatttatgaaagttagatttgaaaaatttaggagaagttaggtgtcgtggtttatgttcgtaattttaatattttgggaggttaaggtgggtagatattaggtcgggagtttgatattagtttgattaatatggagaaattttatttttattaaaaatataaaattagttaggtatggtagtgtacgtttgtaattttagttatttgggaggttaaggtaggagaatcgtttgaattcgggcggtagaggttgcggtgagttgagattatgttattgtattttagtttgggtaataatagttaaattgttttaaaaaaaaaaaaaaaaaatttaggagttatttttagtttattttggtttaagttttatatataaagaatatttaaaataagttattgtaagttttataaagtaatttgtattggggaaaggattatatatgaaataggaatatatatgttattttttatgggatattttagagggatttcgagtttggttttagattattaataaaagagttatataaattttttggttttttagtgtatatgaaagttttttatattaaagtgtagtttgttaagtgtgtaataatatgtttaaaaaaataatgtatatattttaattttaaaatattgttaaaagatgttagggattatttgagtttttagcgagttataaatgttggtgtggggtattgttgagggttgttgattgattagggtggtagttgttgaaggttgggatgattggtaattttttaaaataaggtaataaggaagtttgttttatttttttgtttgttttgagatggagtttcgttttgttatttaggttggagtgtagtggtatgattttggtttattgtaatttttgttttttggtttaagtgatttttgtgttttagttttttgagtagttgggattataggtgtttgttatcgtgttcggttaatttttgttatttttagtagagatagggttttgttatgttggttagtttgggttcgaatttttggttttttaaagttttgggattataggtatgagttattgtatttggttatttattgattgttttatttattaaagatttttttgtagtatgtgatgttgtttggtagtattttatttatagatttttttttaaaattggggttaatttttttaaattttgttattgttttgttaattaatattttgaattttttgttgttatttaaatataatttatagtatatttattaggagtagattttattttaataaattattttttttgtttattcgtaaaaagtatttttttatttattaaagttttattatgagatggtaataatgtagttatatttttaggttttatttttaattttatttgttttgttatttttgttatatttatagtgattttttttattgaagttttgaattttttaatattagtgatgaggattggaattaattttttttaaatttttgttaatgtggagatatatgtatatatttatgtataatgtatgtgtgtgtgtatatgtgtgtgtgtatatatatatatatatatatatatatatatatatatataaaatggataggtatgttgttttgtttgtaaaatattatttagtgtgttaattgaaatatatataatttttaaatatttatatatgtattttatatatattatatatatatatatatatatatatatatattttttttttttttttttttttttttttaaagagtgttttattttgttatttagattggagtgtagtggtatagttagttgattgtagttttaaatttgggtttaaataattttgttattttagtgttttgagttgttgggaatataggtatgtgttattatttttggttaattaaaaaaaaaaaaaaattgtagagatagggttttgtattgttgtttaggttggttttaaaatttttggttttaagtaatttattttggttttttaaagtgttgggtttataggtatgagttattgtggttgatatatgtatttttaatttttcgtttttttttttttttttttttagtttttagttatatatcgtaagtggatattttgattttttatgaattataaatgtttttaatggtatttcgaatgatgaattttttttagaagatttttaatttattttgtttagaattattagaggaattatgatgatagttatagttttatgaaatgtattttgtaaataagatttgaaagttaaaatttttttttgatttttgggttttagaatggatgttgtgttagtaagtacgataatagtattagtttttgtatatttttattagaatttttggatgattaggtgtattgttaatgaggagtaatattttgaaaggaattttttttttgagtattagagtttaatagtgggttttaaatattttttaagttatgttgtaaatagatgtgttgttattaattagtttttgttggtttatttatagattatatttagtataatttttaagggtattaggatttttagaatggtaaaggaatgttggttttaaagttattagttgtattagtttttaataagagtattagtttgttttttgaagttttgaagataggtattgatttttttttagttatgaaagttttagatggaatttttttttaatagaaggtcgttttatatatatttaagatttgttgttttggttgggtacggtggtttatatttgtaattttagtattttgggagatcgaggcgggtagattgtttaaggttaggagtttaagattagtttggttaaatatggtgaaattttgtttttattaaaaatataaaattaatttggatatggtggtatattttgtaattttagttatttgggaggttgaggtagaagaatcgtttgaatttaggaggtagaggttgtaaaagatcgtattattgtattttagttttggtgataaagtaagattgttttaaaaataaaagattgttgtttagtgtagttgtttttattaatgattttagttagatttggataatttgatgtagtttttacgttagtatttgttgttttattttgtatttttatgttatgaagatagtttttttttttaaattttaggaattattttttttgttagtttttagttttttttttgtaatttttttattttttttagtttttatagaattgaagagttagggttttgttttggattaggttttggtttaagggaatgttgtggttgtttttattttttatttagattaattagaattttttttatattagtaataaggttgtttagttttattgttttttgtgtgtttattggagtagtatttttaattttttttaaaatttttttttttgtatttatgatttggttttttttttttgtatttataatttggttaattggagtaagaagtttagttttttgtttattaatattatttttttattaatttaattatgtttgtttttgatttaaagtgataggtttttttttttatttggatatttagaggtttttgtaggattattagttggtttaattttaaaattgtgtttttaggaatagggaggttttaggagggggagagagaagggaaagttcggtggaatagtttaaatatatatagggtttatggattaattttttttttttttatgagcgcggtttatggtgttttaaaataattgtaataatattaaagattattgattatagattataatagtagatataataataatgaaaaattttgaaatattgcgagagtattaaaatgtgatatagagatataaagcgagttaatgttgaaatataggtagtatttgttaagcggtataaaataatttatgtttgtatttttagaaagtataggtatagtaaagtaaggaatagtaaatgtttggggtagttgggattaaatgagttcgagtttatataagtgatgtgaaattgtttcgggttaggcggtttgtgtgttttttcgggtggtaattggtatgtttttagggtacggttagttttagcgggtttggaggcgaagatcgcgtatttttttttgttttcgcgtttttggttttcgcgggtttcggagcgattgggaggagttttaattttgggaaggattagttcgatttacgggagttcgggcggcgcgtaattagaattaattggttttacgttcgggggtagggggcggggtcgtcgaggaagggtcgagggcggggtcgggttcgggagtttgtggttttaggaagaggagggtaaggtgtttggttgcgcgtttggttgtaatgagttcggtttcggggtttcgtagggggtattcggtaggtaggtagggggcgtcgattgggtatcgagtaggtttgcgttttgtttcggttggaggggaaacgagggttagtggatcgggcgcgcggatcggagtggggtcgcgggttttttcggttttgtagggcggtttggagaagttgtatttttggattgaagcgtttagggcgggtggggacggtttcgcgttttagtttaagaaatattcggggatttggttgtcgttttttggcggtttcgagtagcgacgtcggcgtcggggcgtgtttttgtcgtttttgtttttcggggcgatgagcgttttcggggcgtttcggttgtttaaattttaaaaggttgtttttacgcgggtttggcgtttttttatatttggtcgtttgaaatgttgggggttggattttttgtttgtttatttcgaaaagtgaaaaggaggggttgtttcgtcgagttataatgaaaatataataggttcgcggggtgttcgggttaagattttgggttttttcgggttttagttggaggcggttagtttttggcggttagtatatttcggtattttttttttttatttaggaaatttgttgttgtttgtcggtttgagttaaaattataataatttttttttgtaaagtaattaattgttaagagcgtacgttttgttatttattattggtaaagtttagaaattttaagtttggttagagtgaaataaataaaaaggtcgaaacgtttgtagttggtcggtcgtggtggtttacgttttgtaattttaatattttgggaggtcgaggcgggcggattattagaggtcgggagttttcgattagtttaattaatacggtgaaatttcgtttttattaaaaatataaaaaaattagttaggtttgggcgtaagttattggggaggttgagataagagaatcgtttgaattttggaggtggaggttgtagtgagtcgagatcgttttattgtattttaatttcggcgatagagtgagatttcgaattaagaagaaaaaaaaaaaaaaagaacgaaacgtttgtagttggttagagtgtttttgtttaagaattttttatattttgttgtataaaggaaatggtgttttagaggtaagttgtaaaagttatatggtcgtagaggaggtagataggtagttttgttttggaggtatagtgtagggtttagttgtagtttttaggggcgggaagtcggggtttttttttatttatttgtttttttttttttttttttttatcgtattttttagtgtatgttttaggtttgatggaggttattttatatagggttattaaatatattgttgatggagtcgatgggtagatttttatagagagtgtagtgaatgaagacgatgatagtagaatgatcgaagtcgtttgggaagttgaataaagtttagaaaggtagtcggtttcgggtgggaggggttgcgtggggatgggtttatagagattttggaatttgtaggtgggttggtttttaattttagttttattttgtcgattttggtacgtttggtttattttttttgtttttgtttttgagttgtggagttgtgagataaggtatttaaggtattaggttattaataaatggtagttggtaggattatttggagggattattaaattagagtgaggtgaaaaaaggaatgattagttttgtaaaatttaagttgatttaaggaataaggaggtggtagttatattattttgtaaaggaagagaagtgaaaagagggttagatatagtggtgggcgtttttagttttagttattggggagattgaggtaggagaatcgtttgaaatttggaggtggatttgtagtgagttaagattgcgttattgtattgtagtttgggcgatagagggaggttttgttttaaaaaaaaaaagtgaaaagaggttaagaattaggtttaaagaagggtatatttttgataagtagattgtagatgaaaaggaatttttatatttgttatatagggtagtttttttattaaaatttattttttttatattaataaagttattttttattttatttaggtttttaaatattaacgtaggtcgggcgtggtggtttatgtttgtaattttagtatttttaggaggttgaggtaggtggattatttgaggttaggagtttaagattagttaggataatatagtaaaattttgtttttattgaaaatataaaaaaaaagtagttgggtgtggtggcgtatgtttgtaattttagttatttaggaggttgaggcgggagaatcgtttgaattcggaggcggaggttgtggtgagtcgagattacgttattgtattttagtttaggtaatagagtaagattttattttaaaaagatagtaataaaaaataaatattaatgcggtataatgatatttaagtgtttttttttggaaagtttgtttttttgggatatatagtttaaggtggttatgatgtgttatttttttttaatttgtgggtaaagtttattaattttagaaaagtattggaatttaggttttggtatttgtttttatagttttttgttttgatttagtgtttgttagagtggttattggatttggttattaattggtattgtaggatgtagggtgtattttgtgagagtgaaggtaagttatagttggttagtattagaattgggatgtttagagtttaggtttttttttatattcgtagtattaataaataataataataataaaaaatttaaaaaaaaaattttttattgaggttgttaaatttgttaattttgaaattgaatgtattaagagatggggtttagttttgttatttaggttggagtatggtgattatttataggggtagttatagtatattatgttttagaatttttgggtttaagagatttttttgttttggttttttaggtaatcgggattataggtttgttattatgttcggttagaacgttattttaaatagatttttttgagtagttatttaatattagttagttatttttaaatttgtaggttttgattaatgtgagggtatatttgagataatttaaatttatattttaagttattaattttaatgtgttagttaataattgggaagttatttttttggtaatatgagaaataagagttttaaagatttaagtaagaatatatttttagtgtttttattttgagggatatgagttagtttgttgagtagttatttggtatagtttttatgagttaggttgtgagtcgttttcggtttagtagttagtatggagtagaagttataggaggtgagtcgttggtttgttgttatcgaggaggatattgagatatgagtgttttttaagttgtgtagaattttggtatgtgaggaggatggttgtgatatatggatttaatttttttgaagttattgtttttttatattttaattggttaaaagataagtaggtgaggttattaaaaggtagtagatttcgatagtttttgaaaatgggaagagtgaaatttttgtgttgtttttatagagtagtgtgtggagtaggaagtatttcgttattgtgtttatttagggtaaaggtcggattaaatagtttttttatttgttatgtagcggggaggattagttggagaggttgtttttggtttttatattttagtgtaaaaattattttgtgaaaaatgtagttgttattttttttttttaagattttgattttgttttagttaggatttaggaatttgtattttaatatgtatattaggaattttgatgtttaaggttgagtaaaattgatttagggcgtatagatagaggatgttttagtgtggggttttagttgggttttattgtttggggtagttttaggaggaataggttaaaagggatttgaattgaattttttattttgtattttttttgaggagaagtgaggttagattaattaggtgatgggggttagtaatggggagatttttaaggagaggggaattaatttttttggttaggagatgatgggtaagagtttatgttttagggttatttttttttaattgaagggtgtattttgttatattgttaatattttagtttatttattgttgttttttttttaagttgttgagttattaggtaaaaatagatgtatgagtggatggggtttttattgtagaagatgttatattttgtattgtttagtgtagaagttattggttaatttatttaaattgataataaaatcgagttttttagttgtattagttgtatttaaatgtttagtagatatatgtggttagtggttattttatgagatagtgtaaatacggaataattttattattatagatatttttatgatatagtattgttttagagagtagagaggaatttagtggaaggttgtttagggagtagggagtttagttgagaatggagagtagagggttttttttatagggttggaaatgtagatgtgttatgtaggagatttaaggtttaagtttttgtttttgtttttttttttttttatttaaatttttattttttttaggtttatattattgttaatttagtattaattataaattatattttagtttttttgtaggatttaatttttttttagaaaatgtgtaaaaatattttttgtataataaagtaattttatattttaatttcgtaattatagaattgttattttaggtatattttgtagtgaatgtatttgtgtaatattttttttatttttgtttataagattgttattttgtaggttaagttgggggtgagaaagtatagagttgttatagtttgtttattagtaagtagtttttttttatttttttttttttatatattttggtttttaaattaattaaaatagaagggttttaagagtttgggagttagaagggggatgggagtttttattatattttattgttataagtaaaaaataattaataaaaattaattttttttaatagg

SEQ ID NO: 2054 - DNA, 10132 bp, Artificial Sequence
  chemically treated genomic DNA (Homo sapiens)
tttattaaaaaaagttgatttttgttaattattttttatttatggtagtaaaatatagtaggaatttttattttttttttgatttttaaatttttaagatttttttgttttggttagtttaaaagttaaagtatgtgaagaaaaggaaatgaagggaaattgtttattaataaataaattataatagttttatgtttttttatttttaatttgatttgtaaaataataattttataaatagaaatggagaaaatattatataaatgtatttattgtaaaatatgtttagagtaatagttttgtgattacggagttgaaatatgaagttgttttgttatgtagaaaatgtttttgtatattttttgaaaaagaattaagttttataggaaaattgaaatatagtttgtggttaatgttggattagtagtggtgtaagtttggaagaggtagaagtttgggtggaggaagggaagggtaagggtaaagatttggattttggattttttgtatgatatatttgtatttttaattttgtaaggggagttttttgttttttatttttaattggattttttattttttggatagttttttattgaatttttttttattttttagagtagtgttatgttatggaagtgtttgtgatggtggaattgtttcgtatttgtattgttttataaggtagttattggttatatgtgtttattgagtatttaaatgtagttaatgtaattgaggaattcgattttattgttaatttaaatgaattggttagtggtttttatattggatagtgtaaagtgtggtattttttataataaaggttttatttatttatgtatttgtttttatttgatagtttaatagtttagaggggagatagtaatgaataaattgaaatattagtagtatagtaagatgtattttttagttgaggaagaatgattttaaagtatggatttttatttattattttttagttaaaagggttggtttttttttttttagagatttttttattattagtttttattatttgattgatttaattttatttttttttaaaaaaaatataaggtggggaatttagtttaagttttttttagtttattttttttggaattgttttaagtaatgagatttaattaagattttatattaaggtattttttgtttgtacgttttaagttagttttgtttaattttgggtattagaatttttggtgtgtatgttaaaatgtagatttttggattttaattgaggtagaattagaattttggaggaaggaggtgatagttgtattttttataaagtgatttttatattaaggtgtgagagttaaaagtaatttttttaattggtttttttcgttgtatggtagatgagaaagttgtttaattcgatttttgttttaggtgagtatagtaacgaggtattttttattttatatattgttttatgaagatagtatagggattttattttttttatttttaaaagttgtcggaatttattgttttttgataattttatttgtttattttttaattaattagagtataaagaaataataattttaagaaaattaaatttatatgttataattattttttttatatgttaaaattttgtataatttggaaagtatttatgttttagtgtttttttcggtggtagtaggttagcggtttattttttgtggtttttgttttatattgattgttgagtcgaaggcggtttataatttaatttatggaagttgtgttaaatggttgtttagtaaattaatttatattttttagggtgaaaatattggagatgtatttttgtttgggtttttaaaatttttgttttttatattgttaaagaagtagttttttagttgttagttgatatattaaaattaataatttaagatgtgagtttgggttgttttaaatatgtttttatattagttaagatttataggtttaggaatggttaattagtattaagtagttgtttaagaaaatttgtttaaaatgacgttttggtcgggtatagtggtaagtttatagtttcggttatttggaaggttaaggtaggaggattttttgagtttaagagttttaggatatagtgtgttatgattgtttttgtgaatagttattatattttagtttgggtaatagagttagattttattttttaatatatttagttttaaagttaatagatttggtaattttagtgagggattttttttttaagttttttgttgttgttgttgtttgttaatgttacggatgtagaaaaaaatttaggttttggatattttaattttgatgttggttagttgtaatttatttttatttttataaagtgtattttgtattttgtagtattagttaatgattaggtttagtggttattttagtaaatattgaattagaataaaaagttatggagatagatgttaggatttaagttttaatatttttttggagttgataaattttatttatagattgagagaaaataatatattatgattattttgagttgtgtattttaagaagataagttttttagaagggggtatttaagtattattatgtcgtattaatatttattttttattattatttttttgggatggagttttgttttgttgtttaggttggagtgtagtggcgtggtttcggtttattataattttcgttttcgggtttaagcgattttttcgttttagttttttgagtagttgggattataggtatgcgttattatatttagttattttttttttgtatttttagtagagatagggttttgttatgttgttttggttggttttgaatttttggttttaagtgatttatttgttttagttttttggaagtgttgggattataagtatgagttattacgttcggtttgcgttaatatttaaaaatttggataaagtaagaaatagttttattgatatggagaaaataaattttaatgaaggagttattttgtataatagatatagaaatttttttttatttgtaatttatttattaaaaatgtgtttttttttaaatttgatttttgatttttttttattttttttttttgagatagagtttttttttgtcgtttaggttgtagtgtagtggcgtaattttggtttattgtaagtttatttttaggttttaagcgatttttttgttttagtttttttagtagttgggattagaggcgtttattattgtgtttggttttttttttatttttttttttttgtaggataatgtaattgttatttttttattttttaaattagtttaggttttataaaattaattatttttttttttattttattttaatttgatagtttttttagataattttgttagttattatttgttgatggtttgatgttttagatattttattttatagttttatagtttaggaatagggatagagaaagtgggttaggcgtgttaaggtcggtaaagtgaagttgggattgaaagttagtttatttatagattttaaagtttttgtaggtttatttttacgtagttttttttattcgagatcggttatttttttaaattttgtttaattttttaaacgatttcggttattttattgttatcgtttttatttattgtattttttatgaaaatttatttatcggttttattaataatgtatttagtaattttatgtagagtaatttttattaggtttagaatatgtattggggagtgcggtggaggaagaagaggaagggagtaggtgagtgaaggaaagtttcggtttttcgtttttagagattgtaattggattttgtattgtgtttttaggataaggttatttatttattttttttacgattatgtgatttttatagtttgtttttggagtattattttttttgtgtagtaaaatataaagagtttttaaataaaggtattttaattaattgtaggcgtttcgttttttttttttttttttttttttgattcgaagttttattttgtcgtcgaggttggagtgtagtggggcgatttcggtttattgtaatttttatttttagggtttaaacgatttttttgttttagtttttttagtagtttgcgtttaggtttggttaatttttttgtatttttagtagagacggggttttatcgtgttagttaggttggtcgagaattttcgatttttggtgattcgttcgtttcggttttttaaagtgttgggattataaggcgtgagttattacggtcggttaattgtaggcgtttcgatttttttgtttgttttattttggttaggtttgaagtttttaaattttattagtaataagtgatagaacgtacgtttttagtagttgattattttgtagaaaaaagttattgtggttttggtttaaatcgatagatagtagtaggttttttggatgaagaagagagatatcggggtgtgttggtcgttaggaattggtcgtttttagttgaagttcgggaggatttagggttttggttcgggtatttcgcgggtttgttatgtttttattatgattcggcggaataattttttttttttatttttcgaagtgagtaaataaaagatttaatttttaatattttaaacggttaggtgtgggggaacgttaggttcgcgtggggatagttttttaaggtttaaatagtcggggcgtttcgaaagcgtttatcgtttcggaggataaaggcggtaggggtacgtttcggcgtcggcgtcgttattcgggatcgttaggaggcggtagttaggttttcgagtgttttttagattgaagcgcgaaatcgtttttattcgttttgagcgttttaatttaagagtgtaatttttttaggtcgttttgtaaagtcgaaggaattcgcggttttatttcggttcgcgcgttcggtttattaattttcgttttttttttagtcggagtaagacgtagatttgttcggtgtttagtcgacgttttttgtttatttgtcgggtgttttttgcggagtttcgaggtcgagtttattgtagttaaacgcgtagttagatattttgtttttttttttttgaagttataggttttcgggttcggtttcgttttcggttttttttcggcggtttcgttttttgttttcgagcgtggggttagttggttttgattgcgcgtcgttcgggttttcgtggatcgggttggttttttttagagttaaagttttttttagtcgtttcggagttcgcggggattaagagcgcgggggtagggagaggtacgcggttttcgtttttaggttcgttgggattaatcgtgttttggggatatgttagttgttattcggggggatatatagatcgtttagttcgaggtaattttatattatttgtgtgagttcggatttatttaattttagttgttttaaatatttgttattttttattttgttatgtttgtattttttagaggtataggtatagattgttttatatcgtttagtagatattgtttgtattttaatattggttcgttttgtgtttttgtgttatattttggtattttcgtaatattttaaaattttttattgttattatgtttgttgttgtgatttgtgattagtaatttttaatattattgtaattgttttggggtattatgaatcgcgtttataaaggaaggggaaattaatttataagttttgtatgtgtttggattgttttatcgaattttttttttttttttttttttttggggtttttttatttttggaaatataattttgaaattaggttaattaataattttataaaggtttttaagtgtttaaatgaaaggaagagtttgttattttaaattaaaagtaaatatgattaagttagtgaggaagtaatgttggtaggtagaaagttaggttttttgttttagttagttaagttgtgagtgtaaaggagaaaagttaagttatgaatgtaaaggaaaaaattttgaaggaaattaaaaatgttattttagtaaatatataaaagataataaagttaaatagttttattgttgatatggagaaagttttagttggtttggatagaagataaaaatagttataatatttttttaagttaaagtttaatttagagtaaggttttaattttttaattttatggaggttgagagaggtgagggaattgtaaaagaaaagttggaagttagtagagaggatggtttttgaggtttaaggaaagaaattatttttatgatataaaagtgtaaggtgaagtagtaggtgttaacgtagaagttgtattaggttatttagatttagttaaaattattgataaaggtagttatattaaataataattttttgtttttgagatagttttgttttgttattaaggttggagtatagtggtgcgattttttgtaatttttgttttttgggtttaaacgatttttttgttttagttttttaagtaattgggattataggatgtgttattatgtttaggttaattttgtatttttagtagagatagagttttattatgtttggttaggttggttttgaatttttgattttgagtaatttgttcgtttcggttttttaaagtgttgggattataggtgtgagttatcgtgtttagttaaaataatagattttaaatgtatatgaaacggttttttattggaagaagattttatttaagatttttatagttagagagaagttaatgtttgtttttaaagttttaaagaataggttgatgtttttgttaggggttaatataattgatgattttaaagttaatatttttttattattttgaaaattttagtgtttttaagaattatgttaaatatgatttataaatggattaataaaggttagttagtgatagtatatttatttatagtatggtttagagaatatttaaagtttattgttgagttttagtgtttagaagaaaggttttttttaaaatattattttttattgataatatatttggttatttaagagttttgatagagatgtatagagattgatgttgttatcgtgtttgttaatataatatttattttgaagtttagggattaaggagaaattttgatttttaagttttatttataaaatatattttataaggttatagttgttattatgatttttttgatagttttgagtaaagtaaattgaaaattttttggaaaggatttattattcgagatgttattaagaatatttgtgatttatgggaggttaaaatatttatttacggtatgtaattagagattagagggggaaaaaaagaaaaacgaaaaattaaaagtatatgtattagttatagtggtttatgtttgtaaatttagtattttgggaggttaaggtggattgtttgaggttaggagttttgagattagtttaggtaataatgtaagattttgtttttataatttttttttttttttaattagttaagagtggtggtatatgtttgtatttttagtaatttaggatattaagatggtaggattatttgagtttaagtttgaggttgtagttagttgattgtgttattgtattttagtttgggtgatagagtaagatattttttaaaaaaaaaaaaaaaaaaaaaaaaaaaatatatatatatatatatatatatatatataatatatataaaatatatatataaatatttaaaaattatatatattttaattggtatattgggtggtattttataggtaggataatatatttatttattttatatatatatatatatatatatatatatatatatatatatatatatatatatatatatatatatatattatatataggtatatgtatatatttttatattaataggagtttgaaagaagttaattttaatttttattattgatgttgaggggtttaagattttagtgagggaagttattgtagatgtggtagaagtagtaagataaatagaattggaagtggggtttgaaaatgtggttgtattgttgttattttatgataaaattttgatagatgaggagatgttttttacggatgagtaaagaaagtggtttattgagatagaatttatttttggtgaatatgttgtgaattgtgtttaaatgataataaaggatttagggtattagttgataaagtagtggtagggtttggggggattgattttaattttgaaagaaggtttgtggataaaatgttattaaatagtattatatgttatagggaaatttttagtgaatggaataattaatggatggttaggtgtagtggtttatgtttgtaattttaggattttgggaggttaggagttcgagtttagattggttaatatggtaaaattttgtttttattaaaaataataaaaattagtcgggtacggtggtaggtatttgtaattttagttatttaggaggttgaggtataagaattatttgaattaggaggtagaggttgtagtgagttaagattatgttattgtattttagtttgagtgatagaacgagattttattttaaaataaataaaaaaatgaagtaaatttttttattgttttattttaagagattgttagttattttagtttttagtaattattattttaattagttagtagtttttaataatattttatattaatatttataattcgttgaaggtttagatgatttttagtattttttagtaatattttaaaattaaggtatatatattatttttttagatatgttattgtatatttaatagattatattttagtatgaaaaatttttatatgtattgggaaattagaaaatttgtgtgatttttttattggtggtttggaattaaattcgaaatttttttgaggtattttatagggggtggtatatatgtttttgttttatgtgtagttttttttttagtgtaagttattttgtaggatttgtagtaatttattttaaatgttttttgtatatgaaatttgggttaaagtaaattggaggtaatttttggattttttttttttttttttgagatagtttagttgttgttgtttaggttggagtgtaatggtatgattttagtttatcgtaatttttgtcgttcgggtttaagcgatttttttgttttggttttttaagtagttaggattataggcgtgtattattatgtttggttaattttgtatttttagtagagatggggtttttttatgttggttaggttggtattaaattttcgatttggtatttgtttattttggttttttagaatgttgggattacgggtatgagttacgatatttggttttttttggattttttaaatttggtttttataggtagagttaatttagggatagaattatgtagaaatttatagaatgatgagggtttttagataatggtgttttttggggagagtatgttgttttattttaaaaatagtagttaaatagtgtgttaataaggtgttatggggtgtttaatgttggatttaatttagtttttttttgggtggttggttattgtaaaaaatttattttgataatgtttttagatttgatgaaacggtggttttattttttgtaatttttttggattttgtaattttaaaagtaagtaattttagagtgggaaaaaaattaaaatgtgttaaggtattatttttaatatattaaaataagtataatgaatatttaagaaataagtataaggaatttattttatattattatttgggagagaaaaaatttaatttggtaatttttatatgtgtttgtggtttaagttttgatgttattagagtacgaaattaaagaagggtttttatttaaattatttattgtttattgtatgtataaaatattttagaaattattgttttagtaatttattttgtaataaagatatggaatttttatattttttttgtatggtggttgtgatgattgggttaagtgattgtgaaggatttagaatattgtttgttatgtgaagagtttaatgaatattggttattattattttgttgtattcgttggaaatagtagtggtattttttggtttttttattatttattttagttgttttgtatgtg

SEQ ID NO: 2055 - DNA, 15247 bp, Artificial Sequence
  chemically treated genomic DNA (Homo sapiens)
taatttaagtatgtgaattttagtagttaaatatgattggttgatttaggttttgtaggagtttagaggtaaggagggaatgtgggtgagtcgtaggagtttaagttagttaaagttaagtttagaggttagtggatttgtataaatttgaaaaaggtttaatatttgttgtaaatatttgtttgttattgagttttatttaagttatttttatattattatgaatgaagttagatttttagggaaaagtggttaataatttggatttttgcggtagtagggtggattatataatgtttatttttgatattacgtttgatatttatttagttttttagttttatttaaagtttttatgatttagtaggtttaggttaggcgatttttttaggtaattttaataatagttggttttttttttttttagtatttttttttcgtgttattgtttgattatttgtttatgtttacgttttttgttgttgtatttttagagtttaataggtagggggtttaggatatagtagatatttagtatattggatgatttttatgggttagtggttatggttgaatataatatgagaggtttttttttttagaagaatgtgatgaaatatgtaattgatgaatatttagaatttagatatttatttgttttgaaaattgtatttttaatttatatttttagtgtttgtgatagtataaattagttcgagtattgtagaaaataattaataatatgttataagaattttaaaaagtttaaatgatttgaattaaaaatgatttttgaaaataggttttaaggaaataaatataaatgtagaggaaggatgttattgtattgttatagaagaaaataatttaaatgtttttagtaaaggagtatgtaaataaaggaatagttttttgattgtaaattgtgtaggtataggagaaaaatattatattttggaaaaagatttaatgatttggaaaaagttttatttgataatgttaggtggaaaaagtaggatataagattatgtattttataggatttattgtaaaatttttttttatatatatatatatatttttttataaatatataagagagaaaatattggtaaaaatgttatttgtttatcgtaatttttgaatgattgtttgatattttattttgtattttttaagtttttattagtaagtataaaaaataagttaagggtcgggcgaggtggtttacgtttgtaattttagtattttgggaggtcgaggtgggtggattacgaggttaggagatcgagattattttggttaatacggtgaaatttcgtttttattaaaaatataaaaaaattagttgggtgtggtggcgggcgtttgtagttttagttattcgggaggttgaggtaggagaatggtatgaatttaagaggtagagtttgtagtgagtcgagattttgtcgttgtattttagtttgggtgatagagcgagatttcgttttaaaaaaaaaagaaaaaaaagtgaaggtaaaaataaatttttaattattatttttatgttttttttgttttttgttttgttttgtttttgagacggagttttgttttgttattcgggttggagtgtagtggtatgatttcggtttattgtaatttttgttatttgggtttaagcgatttttttgttttagttttacgtgtagttgggattataggtaagagttattacgtttagttaatttttgtatttttagtagagatagggttttgttatgttgattaggttggttttgaatttttgattttaagagatttatttgttttggttttttaaagtgttgggattataggtatgagttattaggtttggtttatgttttttttttttgtaaatattagattagtagcgtggtacgtaaggtcgaggcgggaaaaggtatatttatgtttttttttttagtatagtttatgttatggttattattagatattagaggatatttgggttgtttttttttaagtaggtaattatttatattaaagcgggaaagatatggtgtagttaaataggtagagtagaaggtatgtgttgttattgtatataatattattgttattttttaaagtaaattttatttttttttttggtttgtttaagtttgttttatagtgaataggagttatggagttgtggtgatgtttattttttttttttaaagttaatagttaatattgaattgtaattttttttgttttttgttgtgtttttttttttttttttttgtttaattttgaatttattttataaggttattgtgaagagaatgaaattgaaatatgtagaatattttcggtttttttgaggatgggtggaattagaatagagtaattattttttgtgttgttttgtatgtttgttatttaataatatatgatgtttattttttttattttttttttgtaatattgatgaaataaaatttgtttataaagatttttagttgagtatttaaatgttttttttgaatatttgttatatggtttattttgtaagtttggttttaaatttgttgatattaggattaataatagtatgttttgtgttagtatattttatttttattgagttttgaaaattgattttagagaatagtatttttaaaataatatttttatttatattaataaaaatatttatgaatttatatgattaaaatattaaaatttagaatttaatttgtttatttaattaattatttgtaattatttttaggtaattgtattggtttggttttaagtattttttaattagggttgattttaagaagtgtttttatttaagttgtaattatagtcgatagaatttttatttaatatgtgattttttttaatttttaatttttttgagatgaagttttattttgttatttaggttggagtgtagtggtataattttggtttattgtaattttcgttttttgggtttaagtgattttttcgttttagttatttgagtagttgagattataggcgtgtgttattacgtttagttaatttttgtatttttagtagaggtggggttttattatgttggttagattggtttcgaatttttggttataagtgattcgtttgtttcggttttttaaggtgttgggattataggcgtgagttttcgtatttagttttttatgtaatattataaatttattgttattatttgtaagtttgttttttattttaaaatataagatatgataagattagaaattagttttgtttttttatttttttttttagaaataattttttaggaatttaaatttatagtaataaaaataaaggaaaaaaaaatatgtttttttttatataatgaataaaggttaagaaatgattttaggttttttatttattttgttgatatttgtgttggttagttaagaagatgatttgttcgattattttaatatttatttatttaataaattgtggattttggagatgaatagttgaagttagaattttgattattttttaatagttgtgtaattttgggtaagttatttaatttttttatatttttgttttttaatttgtaaaatgaagataatattagtatttaatttatagggttgttgggagggttaattaagtaaatatataaaaagttgagaatagtttttggtatatagtaagtgtttaataaattatggatgggaggattttgatttatatggagtttatagttttggtagtatggatcgggtaggtagaaaaagatattaaattatatagttaatagtatttttataattgtttttaatataggaaaagtatagggtgttaaagattaatttgtggtttttttttttaatgaattgttaaagttttatttttatgtttaagatttttattatatttttgtaagattaagaataatatgtgaagtttttattattatatatttatttattatatgtagttgtattggaaaaaattaaaagttgataatttttaatttgaagatgatggtatatattatgtatatatattaaggtgtttaaagataaattttagtatttgaggaggtgtagaaattatttaaattttttgattataatgataaattagttagtaatttattaaatattgtattatatattattaagtattttattttttaatatagttttttaaagatataaagttttttaaaatttttgtttatttgggggtaaaatttggggaagtagatttttttagtgtttaaagaagttaatttggtagtgtattagagttgaatatattttttttattataagggaatatattttttttatttaagttaagttgtttttttttggtaaaggaggaaattaatatttatttgtacggagataaacgttttagagtgtttttatattaaataattagtatattagtttagtaagtgataatttacgaataagttaagaagagttaagaaagaaaaagaaaagtatttatttattttttggttgtaaataatatttatattagcgtatggtaaaatttaattttgtatagagtaatttaatttaggattgttgattttttaagagttgagaaagtatagttatggagcgtaaggttttatttagtagggtttaagtatttcgtttgtaaaattggtaggttattaacggtcgcgttttagggcggtttgaaggatgttgataatcgggagtttcgttttgggttcggttatttcgggtatttcgggtcggcggggcgaggttttttaattgttgggttagagcgggatttttttttttcgtatttttttgggtattttcggtttttaggtttttttcggagagttttgtttcgagtttattgggtttttaattttggtttgtttagcgtcgagtagttaattagaaggtagttttttcgagggggcgggacgagggggtggtgttgattggttgagtttgaagtcgttacggattcggggtaataggtagatttgtttgttgagggtggagatttacgagtcgaggttttttgtagtgttttgtatagtaaatcgtacgttatggttgatagtcgggatttcgttagcgattagatgtagtattggaaggagtagcgggtcgcgtaggtatattttgtgtttttcgagcgggttcgaaggttcgtttagaaagcgggggcgtcggtaagtaaaggttcggtttttttcggggcggcgtttggagggattgtatcgcggtttattgggtaggggggatttttttcggtgtagacggatttttatattcgtcgaagtaggggaggggggttcgggtagtggggcgcgggattgtaggttttgttgttcgcgataggttcgggtggttgttttagaattttgtatttttgttaattgggatagaggtcgtagtttgaggatagattgagggtttatggggaaagaggtagagagttgtagttgtaaggaagttagtgaggggagaagtggaattaggttttaatggtgttttttttgaaatattgtttatacgtttttatagttgtggggttttagtagggtagggattgtgttttataattttgaggtttttagtattagttatagtgattggtacgtattatgtatattattaaacgattaaataaaagaatttttatatttattgttttatttgtattttaaaatgttaagtttagtattttagagttggggggtgatattagggattgattaatgcgtttattttattttttgagtatttgtaggtgttaggtattgttcggggtaaggtgtataaattttagtgcggtaagaataatatttttgagaagttgagagtttagtttgggagacgagatatataaatagatgattatattttagcgtggtgagggttttaatagaggttatttgtagaatgtagagggagtgattaggtgggtcggataaagtaggtgatatttgaataggaatttttttaaatgagtaggattttaatttggtggtgggggaggtatttttggtttgtgtttacggttgtagagttttagagggtatttatgaggaggttggattagatgagattatatttggtttgagtttattgttggtagattggtttagggagtttaaaggttttgttttgttttttggttgttggttaatggtagatagaggattgtagttttgttttttttattttgtttagtgtttttgtttaaaatttaggttcgtgaattggggtattaatgttaagtgtttatggattgttttaatggttttttgtttgggaaaaggttgttatttttttttaagggtttggaaaatttttttttttggttttgttttttgttatatattattaggttggtttatgagtttttaaagtaaattagagagaggtagagttttagtaaaggatgtgttattatttattggtagagataaggttagaatttagttttttggatttaagattttttttttatttagtgggtgtaaattttggtttatattgaagtttttatgaatattcggtgaattgagaaaagtgtggataaagtagtgagatttttataaaataaaatattttttttttttttttttttttttttttttttttttttttgagacggagttttgttttgttgtttaggttggagtgtagtggtatgatttttatttattgtaaatttcgtttttcggatttaagtaatttttttgttttagtttttcgagtagttgggattataggtgtttattattatatttagttaatttttgtatttttagtagagatggggttttattatgttggttaggttggattggaatttttgattttaggagatttgttcgttttggttttttaaagtatcgagattataggtgtaatatttttatttttaaaggatttttttttattttgagattagttgtttttttttttgtttgggagaattatgaattgttgaagtttttgttgttgatttattttatatagttgtttatgtgagaaatggttgattttaaaatatatttatagttgggaggtttttaattgaaatatagttattttttttgtttatgatattttagggtattgtgtatatcgttttgattggtagttatattgatgttttattgttttttagttttagttgtttttagtaaaaatcgtttattttttttaggtatttttttttttatttagggttttttaaaaggaattatgtatatgttttatagtttatataatttttaaatattttttttaaatgaaaaattttaaatatttagaaaagttgaaaaaattttgtagtgtatatttatatatttgttatttagattttataaggaatattttgttttgtgttttttattacgttattttatttgtttgtttattttttaatttatttaagttgttttatgtattagtagtttgttttttttattgttgagtaagattttattatttgaatatattattatttggatattttgttgttggatatttgggttatttaattttttttttattgtaagtaaagttgttgtggttgggtatgaaggtttatgtttataattttattatttttggaggttgaggtgggaggatagtttgagtttaggagttgagattagtttaagtaatatggtgaaaatttatttttataataaataaaagaagtagttagatatggtgatatatgtttgtagttttagttattcgggaagttgagttgggaggattgtttgagtttggggtgtggaggttgtagtgagttatgattatatgattgtattttagtttgggtgatagagggagattttgttttaaaaattaaaaataaataaagttgttataaaaatttttatataagtttttttgtgtataggtggttttattttttttaggaaatatttaggagtagatttattgggttataaggtaagtgaatgtgttatgagaaattgttgagtttttttttaaagtggttgtattattttatattttattagtagtgtatgggagttttagttgttttatattttattaatttttggtgttgttagttttttatatttagttgttgggtgtgtagtggtattttattatggttttaatttgttttgttttgatgattaatgatgtaaagtatttttttatatgtttattgattattggtatatatttttttgaagtatatgtttaaattttttgtttttttaaaaattgaattgtttttaaattattaatttatagtttatattttaagtttaattatgtggaattatgtgtaggttaagtgttataataataaattttaatatgtattatggtataaatatattagaaatttatggtcgggtgtagtgatttatatttataatttagtattttgggaggttgaggtgggcggattatttgaggttaggagtttaaaattagtttgattaatatggagaaattttgtttttattaaaaatataaaattagttgggcgtggtggtatatgtttgtaattttagttgtttgggaggttgaggtaggataattatttgaattttggaggcggaggttgtagtaagtcgagattttgttattgtattttagtttgggtaataagagtgaaattttattttaaaaagaaaaaaaaagaaatgtattttttttttatatgaatggtttaaagtggtttgaggttgaaggaggtgggtgggtgttttgttttttatagttattgagggtattaggttgaaggaagtttttttttggttaaatatggtttttatgggcgttattgtttagtatagaaggtttaagagcgtggagaagggtatatgagtgtgggaaggtttagggtttagggttattgttatttatattttgttggttagaattttgttataggttatatttggggtagtttattttttgtttaggaagttgattttattatattatttaaagcgtatattttatatttggtgaaaatttgtttagttatttttttgtgatgcggtaatggatatgtaatataatttttttttaaagaatatgttatttttattttttgatattaagatattttgttagaaaattatgatagtaatagatggtattaaaaaaaaatttttttttgtttggtaaatgtttttatttaagtgggtagttttgtgttaatatgatgttttttattttttaattagttgtgatgttttattgatttaggagagttttatggtttgggattattataggcgaatattttgttgtttttttttttaagaattagagtgttttattttggaaatatagttaattatgtgaaagtaatttattgggcgtattttttgtggttagatttggtttgttgataggtgaattgggagttttgtaaattttaataagtgagtattgagttagatgtgtttatgagtatgatttcgatttatttaaaaatttttattttttttttttttttggtaggagggaggtggttgtgtaggtatttttagttattttgaagggaatttaaatgggaattttattgtttattgtttagaatgttatgggttttttttttgagatatttatttttaatttattttttttttttttttttaagtgtagtttgttgttagtgttttttttttgggggtaaatgggaaatgttaataagtagtttttgatttttttaaaatgggagaatttgaatattttaaattttatttttttatatagtttttttattatttgggagagaggttaagttttagattatttatttttgttagtgagttgtttatgtattatagtttgtgagggtttatatttttttagggtaattttggtaataattgtattgatgttatattgttaatatttgggatggagaaggggtgattgagtgatttaatttttggtttatatgtgtttttattttttttgaaatatatttaggtatggaatcgttaagttattatgtgtagtgggagagattatgggagatgggatagaaatttttaaggttttattttttttttttagtttttgtatggtgggtaggtttatgtaaatttatttttaaagtttgaggaagttgagaggttaaagaaagaggttgataaattaagttttttagaaagaaatgtttagtagggatttaggattagaaattatgtttgtgttttgcgtgttggcgagataagatggtggattttatattattattttttagatttagggtttaatattatagggaagggcgatttagaagggaggtatggtatgattgaagtatgataatgttaaggttgtttgattttagggtaggatttatagtaaataggggtttttttataaggaataatagataaattggaaattttaaaattggagttaattagaagttagtatggtggattagtatttaagacggaattgttttagtttttatagtagttaatatttagattatttttattatttttttatagattaagaaatttgaaggttaggatagtttttggttttttgtacgtgggtgtatacgttgtaggtatttgaatttttgttgaataaatggagaatgttaggtagttatttgttagaaaacgttaggtatattttttattatagaatgaaaagacgttattatgatttttttgggattgatgggtaatttgtattaattaattttttaattaaaagtggaagaatatgtttaggtttttgaaatttttgtgagtgaagggaattattaagtggaaagtgtaatatgttgataaaatattttattagatgaagttaattttattttttttaggaaaatttttttatttatgtattagttttggttaaaagaagtttataaaggtagtaaagttaaaatagaattttattttaagtttttatttttaataattgtgttagtttttagttaagttaatttttgtggtagtttttataataagtgtgtttaaaggtgtttgattagaatttataaattaaaatattttttttattttttggaggggcgatgtagggagagggatagattgttgttgtttttttttgtttgttagaaaggtttttggttatattatattggttcgtggtttagtttatttgtatgttgaatttatatatatttgttttatgtttgttagtatattgagtagtgtattagggattaggtatatagatgtaaaaggagtatatagtttagagaggaaaaatagtgataggttgggcgcggtggtttacgtttataattttagtattttgggaggttaagatgggcggattttttgaggttaggagtttgagattattagtttggttaatatgatggaattttgtttttattaaaaatataaaaattagttgggtgtggtggtggtcgtttgtaattttaattatttgggaggttgagacgggagaattgtttgaattcgggaggaggtggaggttatagtgagttgagattatgttattgtattttagtttgggtaatagagcgagattttattttaaaaaaaaaaaaaaaaaaaaaaaaaaagaaaaatagtgatataaataggtaattataatattttgttatatggggtataagaagatgtttttggttttgttttatgagtggtgtggggtagggtagagagagtagtttaggagaggtacgtatggatgttatgggagttagtagttaggaagatgtaaatatgttaataaggatttttttagagagaggttttaaaattatttagttatagagaagtttttttttttttaaaaatattttggttttaaagttatttattgagttaaaaataataattgtaagttggaggaaatttttttgtttgtttttacgtgttatatgtaataagtaaatttgtgttataatattgatatttttgtaaagttatttaagttttttgagtttgtagtatcgtttattaaatgggattaataatattgatttttggattattgataggtttaagtgagataatttgcgtggttcgttttttagttttatttttttattttatttagtaaatttttattgtattaattatttttattttaaatatatcgtattttgttttttattttttaatattaatattttattttttagtttagattagttttttttatttaatgttgcgttaaatattttttgaagttgggggatttttttttttttagtttttgttttttggttttttttttttgttgttgattgttgaagtttttttgttttattggttttgaaggtaaattgtatatatatgagtttgtggggaaagttgttatataaatgaggataattgatttaattgttagagtggggaaatggaagagattttgaagtttttatttgtaatttaaaaatttaggttttattttttaataggattgatgttaaggaggggatttttttattgggtaggagggaggattgttataattttagtatttttatttttaatagttagtgttattaggaaagattattttaagttttagtattttatttatttatttaattttgtatttgttgtttttgggtgtggtatttatttttgattatattattttgattcggtaattagaagggaatatgtgatgtgtttttatttttgttttaggggtagttttttttttacgttaagaatgttggtatgtaaataatatttttatttgtttagcgttttttttattgagttttttggtatttttttttatatttgtattttttatgggatgtttttttttttttttttttgagacggagtttcgttgttgttgtttaggttggagtgtaatggtacgattttagtttatcgtaattttcgtttgttgggtttaagcgatttttttgttttagtttttcgagtagttgggattatagttatttttttattgtatttggtattaattttgtatttttagtagagatagggtttttttatgttggttaggttggtttcgaatttttgattttaggtgatttatttgttgtagtttttcgaagtgttgggattataggtgtgagttatcgcgtttagtttggatgtttttttattttttaaaggtttttttaaatattttgtttgtaagttgaaaagagtatttaaagagtgaatagatttggtttgttttggttttttaattattttaattttgttattatttaatagttttaggttagtggtttttaattttagtttgaataggagttatttaaaaatagtttaggttttatttagggtatttttattagatatttttaggggggatggtttaggtattaggaggttttaaaaagttttttaggtgattttagtgtattgttaaggttgaaaattaaggttttaggtttaaattaaaggtgaaattgttttttttttggtttattttttattttagaaagtagaaattttttttttggtttattttttattttaaattaaaaataaatttatagagggtaatacgtattagtacgttatagagggttatacgtattagtaatatatgtatttttaaaagagtgatgtgattgggtggtaagtgttgattggatttttaaattgtgatagtttagaaggggttttgttagatgggtttagggatagagatggtagagtgagagagtgtggatggaggagtatgtatttgttatgattattagaaaaataaaattttaaatgttttgttttttttgttgcgaggttatgtttttatagttagtgaagtgatagtatatatgtgttgaatgtgtggtttgtattttatatttaatttttttaatttatgtgttaattttaggaggtatttattattttattttgtagatgaaaatggagatttataaataagtaatttattagtagttatatagttggtaattggtagaattggaagttggatttaggttttagtgttggtatttatagtttttttttgttgttatgttggtttttttttatttggatgaagatataattttagtggtaagggtatttattagtgtgtgagagggttttgtttattagttttgtaaattgtacggttttttttatttaatatttttttttaaatagtttatagattttttgtggttttgtaagtgtttattttttatcgtattgttttttagagaagaggtaggaatttattttaatgtataggatagatatgtatggggagtaaaattatagattttattttaggtgtgtggaaatattaaaaatagtgtttttttttgtgtgtgaagttggtttgttgagttttgttatagatagcgttgagttttttttttaggtggaggtggcgtagttttgcgttatttacgtgttttttttgatttttagtgattcggggaagatattgtagaggtagttgtttgtggttaaaagtattttttgattatggaattagatgaagttatgagtttttaggattatgtggggttagaagaatgtcgttttaattttagaggagggatagttgagtgttttttgatgtaattgaaattggagaattaggtggattaaaattaattatttattatagtaaaataatttattttattttagagatatttgttatttttaaaatattaatattataatttattttattagtaatagtttatttttagtgatagtgaaagttattgattttttttttttaattgaaaagagatgttgtaaatagttggtgtatattttttgagatgtattaaataaggtagcgtatttgaagatcgtggtagtaataaagcgtttgtaagttttgagtaaagtattgattagtatagtttttttggagatcgtttttttattgttggattggatattttattgttaagtttgtaggacgtttttgggtatttttttgattgggagttttgtagaatttagtggttttttttggagtaggtgttgagtatatttttaggttttaaaattatttttttgttttttagagtaagttttttagtagattagtgttgagatttgttaagggtttttggggtattattaaaagttttaggtaatggtttattttgttagattttagtattttggatataggaaattaaaaaagagggtagatggtataaatattgtaaagttatgtattcgtgatagtgtaaatgaaaggtttgattgtgttaatttttttgtattttttttttgtgtttttgtaga

SEQ ID NO: 2056 - DNA, 15247 bp, Artificial Sequence
  chemically treated genomic DNA (Homo sapiens)
tttataggaatatagaaagaaagtgtaggagagttagtataattaaattttttatttatattgttacgggtatatagttttgtaatgtttatattatttgtttttttttttaattttttgtgtttaaagtattaaaatttgataggatgggttattgtttgaaatttttagtgatgttttagaaatttttgataaattttaatattaatttgttaagaaatttgttttgaagagtagaaagatgattttggagtttgaaaatgtgtttagtatttgttttagagaaagttattgggttttgtaaagtttttagttagagaggtgtttaaaagcgttttataagtttaatagtgaaatgtttaatttagtaatgagaagacggtttttagggaagttgtgttggttaatattttatttagaatttataaacgttttattattgttacgatttttaagtgcgttattttgtttagtgtattttaagaaatgtatattagttatttgtaatatttttttttaattaaaaaaaaaaagttaatggtttttattgttattaaaagtaaattgttattggtaaggtggattatagtattaatgttttaaagatagtaaatgtttttgaaatgggataggttattttattgtaataaataattaattttaatttatttgattttttaattttagttatattagaagatatttagttgttttttttttagggttagagcggtatttttttagttttatatgattttggaagtttatagttttatttagttttatggttagagaatatttttgattatagataattgtttttgtagtgtttttttcgggttattggaaattaggagagatacgtaagtgacgtaaagttacgttatttttatttgggagaggaatttaacgttgtttatgataaaatttaatagattaattttatatatagagaaaagtattatttttagtatttttatatatttagagtggagtttgtagttttattttttatgtatgtttgttttgtatattaaaataaatttttgttttttttttagaaggtaatacggtggggagtaggtatttataaaattataaaagatttgtgagttgtttgaaaaaagatattgaataaaggagatcgtgtaatttgtaaaattaataaataagatttttttatatattagtaaatgtttttgttattagagttatatttttatttaagtaggaagaggttaatatggtagtagggagaaattatgagtgttagtattagagtttgggtttaatttttagttttattaattattagttatgtagttgttggtaagttatttatttatgagtttttatttttatttgtaaaatagaataataagtattttttaaggttaatatatgaattaaaagagttaaatgtaaaatgtaagttatatatttaatatatatatgttgttattttattggttgtgagaatatgatttcgtagtagaaggagtaaagtatttgaagttttatttttttagtaattatgatagatgtatatttttttatttatatttttttattttattatttttgtttttaaatttatttagtaaagttttttttaaattgttatagtttaagggtttaattaatatttattatttagttatattatttttttgaagatatatatgttgttaatacgtgtgattttttgtgacgtgttaatacgtgttattttttgtaggtttatttttaatttaaagtagaaaatgaattagaaaaaaaatttttattttttaaagtagaaaatgaattagaaaaagagtaattttatttttagtttaaatttaaagttttggtttttaattttggtaatgtattaaaattatttgaggagttttttaaagttttttgatgtttgggttattttttttagagatgtttgatagaagtgttttgggtgaggtttgggttatttttaaatgatttttgtttaagttaggattgaaaattattaatttagaattattgggtgataataaagttaaaataattagagagttagagtaaattaaatttgtttattttttaaatgttttttttaatttataaataaggtatttaaggaagtttttaaaaaataaagggatatttaggttgggcgcggtggtttatatttgtaattttaatatttcgggaggttgtagtaggtggattatttgagattaggagttcgagattagtttgattaatatggagaaattttgtttttattaaaaatataaaattagtattaggtgtagtggaggggtgattgtagttttagttattcgggaggttgaggtaggagaatcgtttgaatttagtaggcggaggttgcggtgagttgagatcgtgttattgtattttagtttgggtaatagtagcgaaatttcgttttaaaaaaaaaaagggggggatattttataaaaggtataagtatgagaaaagatattaagaagtttagtaaaaggaacgttaaatagatgagagtgttatttatatgttagtatttttaacgtggggagggagttgtttttaaggtagagatgagagtatattatatgtttttttttggttatcgggttagggtgatatggttaagaataaatattatatttaaaggtagtaggtgtagagttggataaatgaataaagtattaaagtttgaggtggttttttttgatgatattgattattaagagtgggaatgttggaattatggtagtttttttttttgtttaatgaaggaattttttttttaatattaattttgttaagaaatgaaatttgagtttttaagttataaatggaggttttagaattttttttatttttttattttaatagttagattaattgtttttatttatataatagttttttttataagtttatgtatatataatttatttttaaagttagtggggtaggaaagttttaatagttagtaatagaaaagggaagttagggagtaaaaattagaaaggaaaagattttttaattttaggggatgtttagcgtaatattggataagaggaattgatttaaattgaaagatagagtattaatattagaaggtgaggagtaggatgcggtgtatttaagatgaaaataattaatgtaatgaagatttattagatgaaatgagagggtggggttagaaaacggattacgtaagttattttatttaagtttgttaataatttagagattaatattattaattttatttaatgggcgatattataaatttagaaaatttaagtaattttgtagagatgttagtgttgtggtataggtttatttgttatatgtaatacgtaaggataggtaaagagattttttttaatttgtaattattgtttttaatttaatgaataattttagagttagaatatttttaaagagagaaaagtttttttatggttggataattttaagatttttttttggagaggtttttgttaatatgtttatatttttttggttgttagtttttatgatatttatacgtattttttttgaattgttttttttattttgttttatattatttatgaagtagggttaagggtatttttttgtgttttatataataaaatattgtaattgtttgtttatgttattgtttttttttttttttttttttttttttttttttgagatggagtttcgttttattgtttaggttggagtgtagtggtatggttttagtttattgtaatttttattttttttcgggtttaagtaattttttcgttttagttttttaagtagttgggattataggcgattattattatatttagttaatttttgtatttttagtaaagatagggttttattatgttggttaggttgatgattttaaatttttgattttaagaaattcgtttattttggttttttaaagtgttgggattataggcgtgagttatcgcgtttagtttgttattattttttttttttagattgtgtattttttttatatttatatatttgatttttaatatattgtttaatatattaataaatataaaataaatgtgtgtggatttagtatgtaaataaattaaattacggattaatatgatatggttaagagtttttttaataagtaggaggaagtagtaatagtttatttttttttttgtatcgtttttttaaaaaatgagagaaatattttaatttataaattttgattaaatatttttagatatatttgttatgaaaattgttatagaaattagtttggttaaaaattagtataattattagaagtagggatttaaagtaaaattttattttgattttgttgtttttataggttttttttggttagagttaatatataaatgaagaagtttttttgggaggagtaaggttggttttatttggtgaaatattttattaatatattatattttttatttagtagttttttttatttatagaagttttaagaatttaaatatatttttttatttttaattaaaagattggttaatgtaaattgtttattagttttagaggagttataatgacgtttttttattttgtgataaagaatgtgtttagcgttttttagtaaataattgtttaatattttttatttatttaataaagatttaagtgtttataacgtatatatttacgtataggaaattaaagattgttttgatttttaaattttttggtttgtgggaaaataataagggtggtttagatattgattgttgtggaagttaaagtaatttcgttttagatattgatttattatgttgatttttgattaattttagttttaagatttttagtttatttattattttttgtgaaagagtttttatttattataaattttgttttgaggttaaataattttgatattattatattttagttatgttatattttttttttgaatcgtttttttttatggtattaagttttgggtttgaggggtaatggtatgggatttattattttgtttcgttaatacgtaagatatagatatggtttttggttttaagtttttattaaatatttttttttgagaaatttgatttgttagtttttttttttggttttttagtttttttagattttgggggtaggtttgtatagatttatttattatgtaaaagttaaaaaaaagaaatgaaattttaaaaatttttgttttattttttatagttttttttattgtatataatgatttagcgattttatatttaggtatattttaggagaaatgaaagtatatgtggattaagggttaagttatttagttattttttttttattttaaatgttagtagtgtaatattaatgtagttattattaggattattttaaaaaaatatagatttttataggttataatgtataggtaatttattgatagaaatggatagtttaagatttaattttttttttaggtaataagagaattgtataaaaaggtaaggtttgaaatgtttaaatttttttattttaaagggattagaggttatttattaatattttttatttatttttaagaaaagagtattggtagtaagttgtatttaaaaaaaaaaaaaggaaatgggttaaaggtaagtattttaaaagaagagtttatggtattttaagtagtgagtaataaagtttttatttaagttttttttaaagtggttgggaatatttgtataattattttttttttgttaagagagaaaaagaaataagaatttttaagtggatcgaggttatatttatgaatatatttgatttaatgtttatttattaaagtttataaaatttttaatttatttgttagtaaattaaatttgattatagaagatacgtttaataaattgtttttatatggttgattgtgtttttaaaataggatattttgatttttgagagaggaggtaatagagtgttcgtttatagtagttttaaattataaagtttttttagattagtaaagtattataattaattgggaagtggaagatattatattagtataaagttgtttatttagataaaagtatttattaagtaaggggagatttttttttaatattatttgttattgttataattttttaatagaatattttaatgttagaaagtaaaaatgatatattttttaaaaagaaattatgttgtatgtttattgtcgtattataagaaaatggttggatagatttttattaaatatgaaatgtacgttttggataatatagtagagttagttttttggatagggggtagattattttaggtgtggtttgtaatagagttttagttaatagaatgtaagtggtagtgattttggattttaaatttttttatatttatatatttttttttacgtttttgagttttttgtgttggatagtgacgtttataaaagttatgtttgattaagggggagttttttttagtttggtgtttttaataattgtgggaagtagagtatttatttattttttttaattttaaattattttgggttatttatgtaggaaaggaatatatttttttttttttttttttgagatggagttttatttttgttgtttaggttggagtgtaatggtaggatttcggtttattgtaattttcgtttttagggtttaagtgattattttgttttagttttttaagtagttgggattataggtatgtgttattacgtttagttaattttgtatttttagtagagatagggtttttttatattggttaggttagttttgaatttttgattttaggtgattcgtttattttagttttttaaagtgttggattataggtgtgagttattgtattcggttataaatttttaatatgtttatattatgatatatgttgagatttattattataatatttagtttatatatgattttatatgattgaatttaaaatatgggttatgaattaataatttaaaagtaatttaatttttaaaaagatagaaaatttgaatatatattttaaaggaatatatattaatggttaataagtatgtaaaaagatgttttgtattattagttattagagtaaagtaaattaaaattataatgagatattattgtatatttaataattaaatgtaaaagattgataatattaaaagttggtaggatgtggagtaattggaatttttatatattgttgatgaagtataaaatggtataattattttggaaaaaggtttagtagttttttataatatatttatttattttatgatttaataaatttatttttaggtattttttaagagaaataaaattatttgtgtataaaaagatttatgtaagaatttttatagtagttttatttatttttaatttttaagatagggtttttttttgttatttaggttagagtgtagttatgtaattatggtttattgtagtttttatattttaagtttaagtaatttttttaatttaatttttcgagtagttgggattataggtatgtgttattatgtttggttattttttttatttgttgtagagatgggtttttattatgttgtttaggttggttttaatttttgagtttaaattatttttttattttagtttttaaaagtggtagggttataggtataagtttttatgtttagttatagtagttttatttataatagaaaaaaaattaaatagtttaggtgtttagtaataggatatttaaatggtggtatatttaaataatggaattttatttagtaatgaaaagaataaattgttaatatatgaaataatttgaatgaattaaaggatggatagatagatggagtaacgtaataaaagatatagggtaaaatgttttttgtagaatttagatggtagatatatagatatatattgtaaaatttttttaatttttttgaatatttgaaattttttatttaaaaaaagtgtttgaaaattatataggttataaggtatatgtataattttttttggagggttttgggtggagggagaagtgtttaaaagaagtaagcggtttttattaagagtagttaaaattgaggaatagtaagatattaatgtgattgttaattaggacgatgtatatagtgttttgagatgttatggataaaggggatggttgtattttaattaagagttttttaattatagatgtgttttggagttagttattttttatatgggtaattatgtaaggtaaattaatagtagggattttaatagtttatgatttttttaaataaggaagaaggtagttagttttagaataaaggggagttttttaaaaatgaaaatattatatttgtaatttcggtattttgggaggttaaggcgggtagattttttgaggttaggagttttagtttagtttggttaatatggtgaaattttatttttattaaaaatataaaaattagttgggtgtggtggtggatatttgtaattttagttattcgggaggttgaggtaggagaattgtttgaattcgggaggcggagtttgtagtgagtggagattatattattgtattttagtttgggtaatagagtaagatttcgttttaaaaaaaaaaaaagaaaagaaaagaaaaagaaaaagaaaatattttgttttgtaaaaattttattattttgtttatattttttttaatttatcgagtatttatgaaaattttagtgtgaattaggatttgtatttattgggtaaggaaagagttttgggtttaagaagttgaattttaattttgtttttgttagtaagtagtggtatattttttattaagattttatttttttttggtttattttaagagtttatgaattaatttaatggtatataataaagaatagggttaagaggggagattttttaggtttttggaggagaatggtagtttttttttaaatagggaattattaaagtaatttatgagtatttagtattaatattttagtttacgaatttgagttttgagtaagagtattaggtagaatagggaaaatagggttgtagttttttgtttattattaattagtagttagggaatagggtaagatttttagattttttgggttaatttgttaatagtagatttagattagatgtggttttatttaatttaatttttttatagatgttttttgagattttgtagtcgtgggtataggttaggaatgttttttttattattaagttaaaattttatttatttaaaaaaatttttgtttaaatgttatttgttttgttcggtttatttggttattttttttatattttatagataatttttattagagtttttattacgttggagtgtaattatttgtttatgtgtttcgttttttagattagatttttagttttttaagggtgttgtttttgtcgtattggaatttgtatattttgtttcgaatagtgtttagtatttataggtgtttaaagaatagaataaacgtattaattaatttttaatgttattttttagttttaaaatgttaggtttgatattttgaagtgtaaatgagataatgaatgtaaaagtttttttatttagtcgtttaataatgtgtatagtacgtattagttattgtgattggtgttggagattttaagattgtaaaatataatttttgttttgttgggattttataattatgaaagcgtgtaaatagtattttaagaagggtattattagagtttggttttatttttttttttattgatttttttgtagttgtagttttttgtttttttttttatgagtttttaatttgtttttaagttgcgatttttgttttagttggtaaaagtgtaaaattttgaagtaattattcgagtttgtcgcggataataaagtttgtagtttcgcgttttattattcggattttttttttttgtttcggcgaatgtaaaagttcgtttgtatcgaaggggattttttttgtttagtgagtcgcggtatagtttttttaagcgtcgtttcgggggaagtcgggtttttatttgtcgacgttttcgttttttaaacggattttcgggttcgttcggggagtatagagtgtatttgcgcggttcgttgttttttttagtgttgtatttggtcgttggcgggatttcggttgttagttatagcgtgcggtttgttgtgtagaatattgtaggaggtttcggttcgtgggtttttatttttagtaggtaaatttgtttgttgtttcgagttcgtggcgattttaggtttagttaattagtattattttttcgtttcgttttttcgggaggattgttttttgattggttgttcggcgttaggtaggttaagattggaagtttaatgggttcggagtagggtttttcgaaggaggtttgaagatcggagatatttaggagggtgcggaaaggaagggtttcgttttggtttagtaattggagagtttcgtttcgtcggttcggggtgttcgggatagtcgaatttagggcggggttttcggttattagtattttttaggtcgttttgggacgcggtcgttggtggtttgttagttttgtagacggaatatttagattttgttgggtggggttttgcgttttatagttatgtttttttagtttttaaaaagttagtaattttgggttaaattattttgtataaaattaaattttgttatacgttaatgtaagtattatttgtaattaaaggatggatggatgttttttttttttttttttagttttttttaatttattcgtggattattatttattagattagtatattaattatttaatataaaaatattttgaaacgtttattttcgtatagatgggtgttgatttttttttttattagagaaaaataatttaatttagatgggaaaaatgtatttttttgtgatgggaaaaatgtatttaattttggtatattgttaaattggtttttttaaatattggagaaatttgtttttttaaattttatttttaggtaagtaggaattttgaaaagttttgtgtttttaaaaagttatgttgaagagtaaaatatttagtaatatatagtataatatttagtaagttattgattagtttgttattgtaattaaagagtttgaatgatttttatatttttttaggtgttaggatttatttttaagtattttaatatatatatatagtatatattattatttttaaattaaaagttattagtttttaattttttttagtataattatatataatgggtggatatataatagtggaaattttatatgttgtttttgattttataaaagtatgataagaattttgggtataaaagtggaattttagtagtttattggaaaagaaagttataaattgatttttagtattttatattttttttatattaaaaataattataaagatgttgttggttgtgtaatttggtgtttttttttatttgttcgatttatattgttaagattgtaaattttatgtgggttaggatttttttatttataatttattgagtatttattatatattagggattatttttagttttttgtatatttgtttagttaatttttttaataattttatgagttagatattaatattatttttattttatagattaggaaatagaggtatagggaggttaaataatttgtttaaagttatatagttattaagggatagttaggattttagttttagttgtttatttttaaagtttatagtttgttgaataaataaatgttgaaataatcgagtaaattatttttttaattaattaatataaatattaataaaataaataagagatttggagttattttttaatttttatttattatataaaaaaaagtatgttttttttttttttgtttttgttattatggatttgaatttttaaagaattatttttagagaaagaaatggagaaataagattggtttttgattttgttatattttgtattttaaaataaagggtaggtttataagtaatgataataaatttataatgttatataggaggttgggtgcgggggtttacgtttgtaattttagtattttgggaggtcgaggtaggcggattatttgtggttagaagttcgagattagtttggttaatatggtaaaattttatttttgttaaaaatataaaaattagttgggcgtggtggtatacgtttgtagttttagttatttaggtggttgaggcgagagaattatttgaatttaagaggcggaggttgtagtgagttaagattgtgttattgtattttagtttgggtgatagagtgaggttttattttaaaaaaattaaaaattaaaaaaagttatatattaggtggaagttttatcgattataattatagtttaaatgaaaatattttttaaaattagttttagttaaaaaatatttgaaattaaattaatataattatttaaaggtaattgtaagtgattggttaggtaaataaattgggttttaggttttaatattttagttatatgaatttatgggtatttttattgatataaataaaaatgttattttaaaaatgttgttttttgaagttaatttttagaatttaatgaaaataaaatatattggtataagatatattgttattaattttggtattaataaatttgaaattaagtttgtaaagtagattatgtaataaatgtttaagaaaaatatttgagtatttagttaggaatttttatagataaattttattttattagtattgtaagaaaagaatggagagaatgaatattatgtgttgttggatgataggtatataagatagtataaggggtaattattttgttttgattttatttatttttagagaggtcgagaatgttttatatattttagttttattttttttatagtggttttgtgaggtaaatttagagttaggtaaaaaggaagagaaaagaatataataagaaataaagagagttataatttagtattggttgttggttttaagagaagagaataaatattattatagttttatgatttttgtttattgtggaataggtttgagtaagttaaagaagaaggtgggatttgttttaaaaagtagtagtggtgttatatgtagtagtagtatatattttttgttttgtttatttggttgtattatatttttttcgttttaatatgaataattgtttatttgggaggaggtaatttagatgttttttggtgtttggtgatggttatagtatgagttatgttaaggagaagaatatggatgtgttttttttcgtttcggttttacgtgttacgttattgatttggtgtttgtaaaaaaaggaaatataggttaggtttggtggtttatgtttgtaattttagtattttgggaggttaagataggtggattttttgaggttaggagtttaagattagtttggttaatatggtaaaattttgtttttgttaaaaatataaaaattagttgggcgtggtggtttttgtttgtagttttagttgtacgtgaggttgaggtaggagaatcgtttgaatttaggtggtagaggttgtagtgagtcggggttatgttattgtattttagttcgggtgatagagtaagatttcgttttaaaaataaaataaaataaaaaatagaagaaatatagaaataataattgggaatttgtttttatttttattttttttttttttttttttgagacgaagtttcgttttgttatttaggttggagtgtagcggtaagatttcggtttattgtaagttttgttttttgggtttatgttatttttttgttttagtttttcgagtagttgggattataggcgttcgttattatatttagttaatttttttgtgtttttagtagagacggggttttatcgtgttagttaggatggtttcgattttttgatttcgtgatttatttatttcggttttttaaagtgttgggattatagacgtgagttatttcgttcggtttttaatttattttttatatttattaatggaggtttggaaaatgtaggataaaatattaaataattatttaaagattacgataaataggtaatatttttattaatatttttttttttatatgtttgtaaaggagtgtgtgtgtgtgtgtgagagagagttttataatggattttatagaatatataattttatattttgttttttttatttaatattattagataaaattttttttaagttattaaatttttttttaaaatgtgatattttttttttatgtttatataatttgtaattaaaggattatttttttatttatatatttttttattgagaatatttaaattgtttttttttataatagtatagtgatattttttttttatatttgtatttatttttttaggatttgtttttagaggttatttttggtttaagttatttgaattttttaaggtttttgtgatatgttgttgattgttttttgtaatgttcgagttagtttatattgttataggtattgagagtgtggattggaagtgtaatttttaagataggtgaatatttggattttggatgtttattaattgtatattttattatatttttttgagagagaaggttttttatgttatgtttagttataattattaatttatgggagttatttaatatattggatgtttgttgtgttttgggttttttgtttattgggttttgggagtataatagtaaaggacgtggatatagataaataattagataataatacggggaaaaagtgttgagagaagggaaggttagttgttattaggattatttaagaaggtcgtttaatttgaatttgttaagttatggaggttttgagtaaagttgagaaattgaataggtgttaggcgtggtgttaggagtaagtattatatgatttattttgttatcgtagaaatttagattgttaattatttttttttaaaagtttgattttatttatggtgatatggagatggtttgagtaggatttagtagtaagtaaatatttataataggtgttgagttttttttaagtttgtgtaggtttattggtttttgaatttgattttgattagtttaagtttttgcggtttatttatattttttttttgtttttgggtttttgtaaggtttgggttaattagttatgtttaattattgggatttatatgtttggattg

SEQ ID NO: 2057 - DNA, 12968 bp, Artificial Sequence
  chemically treated genomic DNA (Homo sapiens)
ttttttgtgatttagtgttgttattaatatataaggttgatagagtaattttaaatttataatattatatgtagatatttaaaggaaagaaaaagagttttatgtgattttgtttaatgggtttatttatagttgtaaatgtatattgtaagtgatttatatttgggaattattatgtaataattatttttaataataattgatataatttattagaatttgtgagaggtttcgatgtaaataatttatttgtttagtagagagaagggaaggagagtaagtaggggaaaatgtttttaaaatgttttattattggaagtaaatgattataaatgtttttgcgttaagttagggtttggttttaatttttttttgaattttaatgtttttatattttttaaatatattttaaatttttattaaataaattatattttaattatatacggagtttaaaagaggtgattttatgatagatatttagtattagttagtgaaggagaatattggttgaaggtatttaaaattacgtgtataaggaatagtttattttttatttggtgatttattattttaagttatttttgtgttaaagttataaaaatttttagtgttaaaaagtgtaagaagaaatgagttagtaaaaaaaaaaaagtcgggggaaagttaatttttaaatttgtattatttttatttttttattttttgttattttagaatgtatatttggaatgaatttttttagagacgtttacggtatgttaaattttaagttatatttttaaataaagtatatatttttatagatgtgtatatgattttatatttatgtatttttatgtataatttgtgatataatttaattaaataattaaggttgtttttgttgattttaatatatttaaaagtagttttttatattgtaaatgttatattatataaaatattttaatgaaagtttaaatgatatttttagttttatagcgtttattataggtgtattttgatgttattaaatgtttttatataattttttaaaaataaaatagagtttggttttttttatagtttagtttattatttgtgttatagtagtggtaatgtaagatttttatgagagtaaaatgtttattaagtatttttaaattttaaaaagattaattttaaaatgtttttagtttgttatttgtgaggtatataatgggtttatgaagtgaaagtgaaattattatatattaattatagtattttatagaaatatttagatggaggaaggatgtaatggaagaattaagggtttttttttttttttttatagtaattagatttgaaaagtgaagtaattttaaagttattttagaagaaaaaaatgtttaattaaattttaatgtttaaaattggatagtgtgtatggtaggtgatttgtatatatatgttattttttattaaaattgttttttatttttgtgatattaatataaattgtagttatttggttttaaattatagtaagatatattttattttttaaaatgtaaatggttatttaaaatagaaataatttttttagacgtattgtatttttataaatgtgattttggaaatatattgttcgtaaagggtaattttaagagaattgttgagattttaattttatttttatgtatattttggggaggtttttgaaagagtaaaaaggtaaaagatttagttattttttgagattatttatagttttttatttaaagttgtagaagaaaaacgttaatgtattgttattgttttttaatgaaattattttttttttaattaattaagtagtattttttaaatttattgtagaaatgtatattttatttttgttgtgagtcgtttttaattttttttttttttttttttcgtaataaaatttggaaaaatttgttacgtagtattcgtttaacgtatcgtttcgttgtattttttttttttttaattttgtattatgataaaagtaaattttagtattattttagggaaatattgggaatgaatttggtaatgttttttttttttttttttttaggtaaaggaaggggaattttgtattgtcgttaaaatgagcgtttttggtggaaaggaattttttatttcgtatacgttgtggttgtttttgaaagtgtaggtttcgtaaaatgttcggtcgattaaggggtttttttttttcggagtttttgtttttttttatttattttagatttttagtaaggaagggtagaggttggtttgttttttttttttaagagggtatcgcgttgcgtagttaatagtttgcgtcgtttcggggaaatttaaatgtttcgcgattttatcgagttaaggagtaaaagttgtgattgttattagttttttgtcgggttttaaattcggggtttatcggttgaaatttttagttgagtagtttttacgacgttgtttttgacggttaaattcggtgtatgtaaggttgggattaattttttttattcgataaaggaatttgatttttttttgggagatcgtagttcgagttcgattcgtagttttcgtcgcggggtttagggttttaggtaagcggttcgagatttagaggagtttttttggattttttcgaggggtaaattattcgagtttgttattttttttggagttaaaagtttatttttggagtcgttatattttcgtgttttttttcgtatttcgggggtttcgggggatgtacgtgggggtggttttaggagttttgggtgggatttcggggaaatgtattggagattaggcgaaaaggttttttttgtttagaatttgtttttagagcgggtcgcgttcgaattcgtaggtaaaggcgttgcggtttttgcgggcgggcgggcgcgcgcgatgtattttttttagggatagagttagaaagtggacgtttgggcggggggagggggggatttataattggaattaggtttaaaaaaattattttaaaagaaaaatgtagtaagtttttttttcgagattttaggtttattaaaataaaattgaattcgggtgttggtagtgtttagggggagcggaggcggagagggttgaggtcgcgggtcgttcgttttagtttttcggaagttcgggtttttgaagtatagatagttaagagcggttcgagttaagttttaggaataggggtttcgggaagagatttcgatcgggtcgtatagcggggaggtttggttcgagagtttttatttggtcggttgcgattttatattggaatttcggaaacgcgttttggtcgttttagtttaagtgggttttggggcggttttttgttttttattttcgaacgttagtttttttcgggcgattcgaaggttacgaggcgggtcgtatagtttcgcgtcgtcgggggcgtttcgggagtttcggggattgcgcgcggcgtttagggagggcggttgttgttttttggcgttcgttagagttcgcggcgcgtttcgatagtttcgcgtagttcgggttcgttcgggaaaggtttttacgttagttaatttcggtttttttttgcgttcgggttcgcggtaacgttcggggatagtttttgcgcggtagcggttatagtattttagttttgggggagggaggagcgggcgttaggggtttcgtgaggtcggcgagggattttcgcgtcggggagtttaattgaggggtttcgcggggattataaagtagttcgcggtggaacggggtcgggattcggggattgggttgtagtttcggggtggatgagaggtttcgggaggtgtagggttcggtagggagggcgtggagggatttatggtgacgggagtagttttcgttgggagggagtttcgtcgggcggggtcggagttggtagcgtacgtcggatcgggggcggggtttttcgagtttcgcgaaaatgttcgtagtatcgcggggatcggcgtagggggaagcggtcgttcgtacgcgaagtcggggtgggtttcgtatttggggtcgttcgagcgtacgggggcggggagaggagcgggggtcgttttcggggagtcggaggggagacgcggggttcgggtaggttgttcggttgttgcgggtgtcggcgttataaggttcgggagtaagtcgcgtggttgtttttaattttttttttagtcgcgcgtttttggggttttttttgattaggaaatttttcgttggtcgttgacgtacgtagtaagtgagacgcgcggagggatcgagtcgcggttcgggcgtagcggtaaaaaatatttattatagaaatcgatttaagggaagacgttgagagtaaacggtacgcgcggacgtcgttcggttttatgtaaggaattagcgtcgtttcgtcgtagttgttagtcggacggtgtaggagcgcggagtggttttttcgggtttcgcggttaaatcgtattttcgttttggaagcggaggtttggttttgggcggtcgcgtaggatttggggtcgttcgcgggttgtagttcggttcgggagtttcgtggcggttattgcgtttgtttgtagcggttcgcggggtcgggttttttcgggtgcggcgcgtcggtcgggtttttttcgggtcggcggggtttgttttttttttttaggttttcggatcgtggttattcgcggagtcgtataagtttgcgtgtggttgcggaaaggggttcgtacgcgggcggggtttcgggttagtatgtaggtttggatgcggggcgcgggggtggttttcgatttttcgttcgggttgcgtatagtagcgcgcggcgcggcggcgggggcgcgcgggttaattttaggagtcggcggcggcgagtcgcgttttggttgatatcggaaaggtttgtgattggtcgtcggtcgtttttatgtaaacgagttgagggaatggaattttttcggtcgggtttatagtaaaagtacgtttatttttaggtatttttatttatagagttagcgggcgcgggcgggacgggcgtttcgcggtcggatttagttagggtattacgttgttcggttttgcgtcgttaggtattttttttcggggtttttagggacgttagaaggaagttaatttttgttgtttttttttggtttgcgttggatttttttttttttgttgtttttttttgtttttttttttttttttttttgaattaattggttttttggttggatgtttttaattttttttttggttgcgaatttttttttaattgttttttttttataatagggggagaaagtgttttgtggttcgaggcgagtcgtgaagttgcgtgtgcgtggtagtgtgcgtggtaggatgtgcgtgcgtgtgtaattcgagtcgttcgatttgtttcgatttgcgtcgcggagtttttttttaaggttcgttttatttgttgcggttacgcggcgttcgtgggtgttcgtgtttcggagtagttaatcggcgggtgttgggcgacggtggaggagtatcgtttcgttgttgttcgagttagggttgagttatttagttgatgtagatagtggttgtttttcgaagagtgcgtgtttgtatgtgtgtgattttgcggttgtttaatttttaataaattagaggattagttataaatttaattaatatttttaaattcgagtttatagatgtgggagagttgtagaattttgagtgttatcgattgggtttttttatgattgttgttttaagattagttgaagatttttgaaacgttgaattttttgtattgagcgttttgatagaatttattgagagaatagagaatatgataagtatttttagtttagtattgttttaattattgaagttgatttttaaggttatttaaaaaaatttgtagcgtatattaatggatttttgttgtgtttaaattttttatagattgtattgtaaatattttatgaagtagagtatatgtatatatttatatatacgtgtatatatattagtagtattatttttggaagttttagtttttgtttttcgggattgaagttagttttgtatgataaaagtggttttgttacgggagataattgtgttttgttgggattttagataaaatttatttgtaaaaaattgataggtattaattattggaatttttaaataatgtgtttgttgatcgttttatttttcgtataaatattttaggaagtgtatgagaattttgtttttaggaatttttttaatagttaaagatagaatttaatttttgtaagtaagattcgtggaagatagtttttattttttaatgtattaagtaatcggttgttaggagtttattttgggttagaggtcgattcgtagaattagaacgttttttttttttggattgttagtaatttagtttttttttttttttaattattttcgtttttttttatttttcgtagtaataaaggtttttgaacgtgtatgttggtttttcgggagttgtttgttgaagattcgcgtttttgtcgtcgtttggtaggagttgtttgtagggttttaatttaatcggtttgttgtgatgcgtattttcgtagatgttagtacgagtcgtcgttttacgtcgttttttatcgcgttgagtttaggtaagatgagcgaggcgttgtcgttgggcgtttcggacgtcggcgttgttttggtcggtaagttgaggagcggcgatcgtagtatggtggaggtgttggtcgattattcgggcgagttggtgcgtatcgatagttttaattttttttgtttcgtgttgtttacgtattggcgttgtaataagattttgtttatcgtttttaaggtattggttcggagagggtggtgggaggataggcggaggtcggcgaggtcgggggagattcgcgagggtagcggttaggcgggcggggtcggattttggaaaggggttttcgtagtttcgggtcggtttttttagtttgggatgtgggggatgttgtgttgtcgtggcgattttcgggaggtattcgttttagttttttggggcggttttttaggagggttgaaaatattagggtgtttttaaagatatttattgggagtcggtcgggatttttttggtaggggttttagttttgatataaagtaggaaaagttataatttagttcggtagagatagttcgtttgttaatttattgttgtttttatcgttggattaatatttaaattattttgttttttttagatgaaaggattaggaaataaaatagtaagatttttttgtttttaagttagtgaaaagaaattaattagggaaattgttagggattttttttttttttttttaatcgttttataggaattagtatgtttaaagtttatagcgggcgtagttaagtttgtaaaagttttttgaagagttttttgagttttttagtttgtttttgttagaagtcgtaagtatcgaattttgttttttttttcggaatcgttttgaatgttattattagtttatttagattaagttaggggtagcgaaaggtgacgaggttgttttcggagagttaggggttttagcggttcgtttttttgttagaggagggggcggcgcgtagtcggagattttagcgcggcggttttaaagatttttttttattttttatttttgattatttttaaagttttgagttgtttttaaaaattttgatttttaataggggtatgaaaataattttaggcgtttttaaataattattttattatattagtagtaagtagtaggaatttaatttttgtagtggagattttgttttgtttttggtgggtttgaaaagatgcgattaagtaaaattagtgcgggttattttttgttcgtttaaagggcgaattaaggtaggtggttttaagtgtaaagataagttattaaaaaaaaagtttaaataattgttttttttaaagggagattaatttaatataagttttttatagttttaagttttagttgggttttgattttattataacgacgaatatttattttttaaaaaagtattgttgcggttatttttaagttttatatagtttttatatttagattgtgatttttaaaataaaacgaaatttgtagttggttgtgtttatagattggtttttttttttatttatttttttaaaagtagttttttttgtttgttttgttttttagtgggggtggaaatgaggagaaggaacgaaggaacgtggtggtttgtttgattttttttttttttttttcgtttatttagatttgggtttgggagattattttatttttaaattattttaattttttgtttaaatggatttagcgatgattttttagggtattcgtattgagaggggatttaatagggttgggttatggggttattattagataaagagtagaggtaagacgggttgataattattaaaggttattaaaatttggttgttttaatgtattagggttttaagagatttgtggtttttttttgggggggaaattagggttttttttgaatttttttttttgttagggaatttatatttaaatatattaaaagattaaatgattaataaataatttttaggaattggagtaatttagagttttaagttattatatgaaagtatttatttttttttaaaaaatgaaaaattatatatattgtttttatgagttgttagaattttttttagtagaaattataataattatagagttttttttttaaaatgatttttggtaatttatttaaaaataattaatttgttttattgagtgataatttataggttattaaaaatttaaatatagagtttttgaaaaaagtttaagtagattttttgagaatatttaggggaaaggaaaggatagtagagaaattagattatttgattattgtttgttattattttaatttttataaaaagaggtttttttttggaggagatttgtttattgtataattagaagagtagataaaatgtttagtgagatagtaaacgtgaagggataaaatgttagggataaaagtaagtaaaatattaaaatttgtttatatttcgggtttatttagtgtgtgtttttggttttattttatttgtttatttaattattttataagtagttttaatagaaattattattttaaaatttggattttaaataagtcgtaggtaatttttttaggaagttaattagtaaataattattatattttttatggtaaagagaagtaaatgtgaaataatgataaggtttgatgatattgatgaaaagattattgaaggtttttttaggaattttttgaagttttgtaggtaaattttttacgttaattttttgaattaaagagagatttaaaattatgaattttttttaaaatagattataataattttatttgtttattttgagttttaatttgttttttttttatttttttttttttatggaatatttttattttttatagtatgagagatatatgttttttattattaagaaaattttaagtttgttgtgtgttttgttgtatttatagaattagtttaaaaagttgttttgatgatttaggatgtatttggtaatattatggtgttatagtttgtttaggttttggtatattagagtttaaagacgtaaacgtgtttttagtagggaagttcggaggttttggattttgatggtaatattttttttataaaaaggaaataagtaatatttttgtcggtaagattatagtttttagttatgttttaaatattattttagttgaattttgtgttttattttatagttttttttgtaatattggaaggttaacggatttgaagtaaatgaattgtaattgtaattttaatttaattagaattggtttaaaatgttagtttggatcgtgaataggttagttaagaatagtattgggaggtttatgtaatatagaagagagttgatatttggtttaattttttgatattttaaaaatagagaagtaaaataaaatatgagatatttttggttagtaagtttttttttgtttgtttggtttgtgttaaaatgtaaatgtttgtgtttttttatttattgtttatagttttttattttagttgttttttttttttgtttgaagttagatatttttatattttttttatattgtttattagtgataaaatttgtattaaattagtacgtatgttagttttgaattaaaaagaaattttttaaatttggtttaagtatgtttgttaataattggacgatatatagtattaatgaattgttttggatttattagtttttttttatttattcgtttttattaaaaaaaaatttttagagattaatataaggttaagtgaatgatatgtaggtgtttaaatatggttgattttgttgtatttaaaaaaaaagaggagtgggagttaaatttttaatttttttttttttaagttttaatattaatagtttttttttatttagtttttatgataattttattttatgtttgtttcgatttggcgaaggttttttgaatttgttaaattattaatgaggatagtattggaaagatgagagaggtataggtttggagtattgtgaggggaatagtagtaggaggtagataatttagaatatatttttgtagttataaaagaagatttatttatttttatttttttatagatttagatttaataatgagttatttagtttgaaatttacgtagtggaggtagtttttgtatatttgttgaatgttgagttataatagagaagtttgggttattatagggagaggaggatgaggaagtaaaaatatgtgtttaaagagggtattttaatattgtgagttaattttataacgggaagtgaaaattatgaaaaaaaggggaaaatttgttgtgagagattaaaaagagtaaaataaagtaagtttatttttcgggaatagaaaaaaaaaaaaaatagtagtaataattaaataattgattagggagatttattttcgtgatatttttttaaaataaaaagggaattgtcgtattattgtttttaattaaatggtaataaatatatttataatgggaattaaatagttaattagagggtgtttggggaataaatagtagagttttaaaattttttatatggaaaatatgtttaataattggaatgaaaggattaaaaagagagaaaaggtttagattttgtttggtagtgtaagttggataaaatagaggaaaatgtttttttgtttttatgagattagattattttggtgtagttttggggttggaagtatgtttattttttatagtgagttagttcgtgttttgtgttataaggattgaagtagttttaatgaataaaaataatagatagttatttggaggttatagggaaagggtgatggttaagtagattatgaaaatgggaattttgagaaatatgatttcgatattatataagtgagtttatggtagttttttttatatatagaaaaagaggtttgaaaatatatattataaaaaattatgtagtagttattaaggtaaaaattgggaagtaggaggtagaggaaggagtgataatattagattaaggaatgttttattgttattaatttaaaaatagtaattaaaaatgatgatgtaattggaatgagtaatataaatgttattattgattttatcgtaaagaatgttagaaatgattagaataaatatagtttggggtatttcgatttgaagttgtatgattgttttgaaaaatagaaataaaggaaatatagttaatagtaaatgtttagattaagaaaatagtttttagaaggtttaaatgatagttaagaaattgatgttattgtataaagtatttttaggttatgttttttagagtattttattttggaatttatttttttaattatttgagtataaaaatatttatttattagttttttttaatagttttgataagattttatatttatttagttatattaaataaatttttggttaagattagttgggttagtagaaaattttaggtatttgtgaggatatgagtttatatacgttgagatttatagatataaaaatgtaatttaattttatttttgaattgaggggagtgtatagaagtgaatgtttcgtttttttgaggtttgttgattttgtaattagtaaacgaagggtgtatttttgattttttttttttgtgtgttagaatttattgttagtaaaatttaagataatagcgatgagtaggaggtattaaagatgaattgtagagggatagtttaagttatttaagaatcgttagtaagatgaaatttatttttagtagaaattgggtttttttgtgtttttttgttttgttttattttttaaaagtaaagtttgtattttgtttagtttgttagtggaggtttgagtaagtaaaagatgggttggattataaatttataaatataggatgttttgttttttaaacgggagaaattaagaagagatgtttgtatttaggagacggtatagttatttaaaatttttgatattttgttatggttagttttgttttaattgtgttatgtgatttattatggttttatgaggtaaatttagtatatgtgttattatttgaaaatttatatatagttatatataatgtattaggttggtgtaaatgtaattgtagtttttggagttaaaaattgtaaatattgtaattatttttgtattaatttaaaatataataaaaaagtgttttttttttataatttttttgttgttttgtttaagttattattgttatttttttgtaatttaaaaagaaattattgaatatatatttaattttagaataattattatataaatgttttaaaagtgtatgtataatatttttgatgtttgtatttgttttttgattggtgtttagg

SEQ ID NO: 2058 - DNA, 12968 bp, Artificial Sequence
  chemically treated genomic DNA (Homo sapiens)
tttaaatattagttaaaggataaatgtagatattagggatgttatatatatatttttagggtatttgtgtagtgattattttaaaattaaatgtatatttaatgatttttttttaggttgtagaggaatagtaatgataatttaagtaaaataatagaaaagttataaagagaagatatttttttattatattttaggttggtgtaaaagtaattgtagtgtttgtaatttttaattttaaaaattgtagttatatttgtattaatttaatatattatgtataattatatgtaaatttttaaatagtgatatatatattaaatttattttataaagttatagtaggttatatagtatagttggaataagattaattatagtaagatattaaggattttgagtagttatgtcgttttttgaatataagtatttttttttaatttttttcgtttgagaaatagaatattttgtgtttgtaagtttataatttaatttattttttatttgtttagatttttattaataggttgaataaggtgtagattttatttttagaaaataaaataaaataaaaaaatataaaaaaatttaatttttgttaaaagtagattttattttgttgacgatttttaagtaatttaaattgtttttttatagtttatttttgatattttttatttatcgttattattttgagttttattagtaatgaattttagtatataagaaaaaaaaattagaaatgtatttttcgtttattaattataaaattaatagattttagaaagacgggatatttatttttatgtattttttttaatttaggggtggaattgggttgtatttttgtatttgtgagttttagcgtgtgtaaatttatgtttttatagatgtttgaggttttttgttagtttagttgattttgattaggaatttatttaatgtaattgagtaagtatgaagttttattagggttattggagaaaattggtagataaatgtttttatatttaggtaattaagaaaatgaattttaaagtaaaatattttgaaaagtatgatttaaagatattttgtataatagtattaattttttggttattatttaggttttttagaaattatttttttggtttagatatttattattggttgtattttttttgtttttattttttaaagtagttatataattttaaatcgaaatgttttaagttgtatttattttgattatttttgatattttttacggtaaagttagtagtgatatttatattatttattttaattatattattatttttggttgttgtttttgaattggtaatagtaaagtattttttaatttagtgttattatttttttttttgttttttattttttaatttttattttaataattgttatataattttttgtagtatatatttttaggtttttttttttatatgtaaaaaaggttgttatagatttatttgtatgatatcgaagttatgttttttaagatttttatttttatgatttgtttagttattattttttttttgtggtttttagatgattatttattgtttttatttattagaattgttttagtttttgtggtatagaatacgaattaatttattatgagagatgaatatatttttaattttaagattatattaggataatttagttttatagaagtagggaggtatttttttttattttatttaatttgtattgttaaataaggtttgggttttttttttttttttaatttttttattttaattgttggatatgttttttatataggagattttaaaattttgttatttattttttaagtattttttaattagttatttagtttttattataagtgtgtttgttgttatttaattaagagtagtgatacgataattttttttttgttttaaaaagatattacggaaataaatttttttgattagttatttggttattgttattgttttttttttttttttattttcgaaaaatgggtttgttttattttgttttttttagttttttataataaattttttttttttttttatgatttttatttttcgttgtaaagttagtttatagtgttgaaatgttttttttgaatatatatttttatttttttatttttttttttttgtggtaatttaggtttttttattgtaatttaatatttagtaggtatatagagattgtttttattacgtgggttttaaattgaataatttattgttgggtttggatttgtaaaaaggtgaaaataaataaatttttttttataattataggaatgtattttgaattatttgttttttattgttgttttttttatagtgttttaagtttgtgttttttttatttttttaatattatttttattggtaatttggtaaatttaggagattttcgttaagtcgaaataaatatagaataaaattattatggaggttaaataagaaaaggttgttgatgttggaatttaagaagaaaaaaattagaagtttaatttttatttttttttttttttaaatgtagtagaattaattatatttgggtatttatatattatttatttggttttgtattgatttttgagggtttttttttggtggaggcgggtgggtaaaggggaattagtaaatttagggtaatttattaatattgtatatcgtttaattgttaataagtatatttaagttaggtttaaaaagtttttttttaatttaaaattaatatgcgtgttaatttgatataggttttgttattgatgggtaatatggagagaatgtaaaaatatttaattttaaatagaaaaaagaaataattggaatgaaaagttataaataataggtaaggaaatataaatatttatattttaatatagattaaataggtaagaagggatttgttggttaaagatattttatattttgttttatttttttgtttttaaagtattaggaagttgggttaaatattaatttttttttatattatatggattttttaatattgtttttggttagtttgtttacggtttaaattggtattttaaattaattttaattaggttgaaattatagttataatttatttattttaaattcgttaattttttagtgttgtaaagaaggttgtggagtggaatatagaatttagttgagatgatatttaaggtatagttagggattgtgattttgtcgataaaaatattatttattttttttttatgaaaagaatattattattagaatttaagattttcgaatttttttgttgaaggtacgtttacgtttttggattttggtgtattagggtttgaataagttataatattatggtattattaaatatattttaagttattaaaatagttttttaggttaattttgtaagtatagtaaaatatatagtaaatttaaggtttttttagtagtaaaaaatatgtattttttatattgtaaaaaataaaggtgttttatgggagggaaggagtagggggagaataggttggggtttaaaataagtaagtagggttattgtaatttattttaaagaaaatttataattttaaatttttttttagtttagaagattgacgtagaggatttatttatagaattttaggagatttttaagaaggtttttagtgatttttttattaatattattaggttttattattgttttatatttgtttttttttattatagggaatataataattatttattggttaattttttagggagattgtttgcggtttatttaagatttaaattttaaagtaataatttttgttgaagttgtttgtgaggtggttgggtgggtagatagagtgaagttagggatatatattaaatgagttcgggatgtaggtaggttttgatgttttgtttgtttttatttttaatattttatttttttacgtttattgttttattgaatattttgtttatttttttagttatgtagtgagtaggttttttttaggaagaagtttttttttatgaggattggggtggtgatagataataattaaatggtttgatttttttgttattttttttttttttttaaatgtttttaggggatttgtttgaattttttttaagagttttgtatttggatttttagtagtttatagattattatttaataaaataaattaattgtttttaagtgaattgttaaaagttattttaaaaaggaaattttatggttattatggtttttgttagaaagaattttgatagtttataaaagtaatatgtataattttttattttttagaagaaaataaatatttttatgtaatggtttgagattttgaattgttttaatttttgaagattatttattaattatttagttttttaatatatttgagtgtgggttttttggtagaggagggagtttagaagagattttgattttttttttaaaaggaagttataaattttttagagttttagtgtattggggtagttaggttttaatggtttttggtggttattagttcgttttgtttttgttttttatttgatagtgattttatggtttaattttgttgggtttttttttaatgcgggtgttttaaagagttatcgttgagtttatttaggtaaagggttagaatgatttaaaagtaaaatggttttttaaatttaaatttaagtaaacggagggagggaaaaaagagttaagtaagttattacgttttttcgttttttttttttatttttatttttattaaaaaataaaataaataaaaaaaattgtttttagaaaagtgagtggaaaaagaggttaatttatagatatagttaattgtaaatttcgttttgttttagaaattataatttaagtgtggaaattgtataaagtttaaaaataatcgtaataatatttttttaaaaagtgaatattcgtcgttgtaataagattaagatttagttgaggtttggaattataaaaagtttatattaaattaatttttttttaaaggggataattatttaaattttttttttagtagtttatttttatatttggaattatttgttttgattcgttttttaaacgaataggaaatgattcgtattgattttatttagtcgtatttttttaaatttattaaagataaaatagaatttttattgtagaaattaaatttttattgtttgttgttagtgtagtagggtgattgtttagaaacgtttggggttgtttttatatttttgttgaaggttaaggtttttaaaggtagtttaaagttttggggatgattaggggtgaaaagtgaagggagatttttggagtcgtcgcgttgaagttttcggttacgcgtcgtttttttttttagtaggaaagcgggtcgttgggatttttggtttttcgaaaatagtttcgttatttttcgttatttttggtttaatttaggtgagttgatgatagtatttagaacggtttcgggaaaagaaataggattcgatatttgcggtttttggtaggagtaggttaaaaagtttagagaattttttagaaaatttttgtaaatttaattacgttcgttgtggattttggatatgttaatttttatagggcggttagagaaggggaaaaaaaatttttgatagtttttttagttagtttttttttattgatttgaaggtagaaaagttttattattttattttttgatttttttatttgaggaagataaaatggtttgggtgttaatttagcggtaggggtagtagtaagttagtagacgggttgtttttgtcgggttgggttataattttttttattttgtattaaagttaaggtttttgttagggaggtttcgatcggtttttagtggatatttttggggatattttgatgtttttagtttttttgggaggtcgttttagaaagttgagacgagtgtttttcgagggtcgttacggtaatatagtattttttatattttaagttaggaagatcgattcggggttgcgggggtttttttttagaattcggtttcgttcgtttggtcgttgttttcgcggatttttttcggtttcgtcggttttcgtttgtttttttattatttttttcgggttagtattttgaaagcgatgggtagggttttgttgtagcgttagtgcgtaggtagtacggagtagaggaagttggggttgtcggtgcgtattagttcgttcgggtggtcggttagtatttttattatgttgcggtcgtcgttttttagtttgtcggttagggtagcgtcggcgttcggggcgtttagcggtaacgtttcgtttattttgtttgggtttagcgcggtggaaggcggcgtgaagcggcggttcgtgttggtatttacggggatacgtattataataagtcgattgagttaggattttgtaaatagtttttattagacggcgataggggcgcggatttttagtaagtagttttcgggagattaatatatacgtttaggggtttttattattgcggggggtgggggggggcgggggtggttaggggaggagggagattaagttattaatagtttaggaggggaaaacgttttggttttgcggatcggtttttgatttaggatgggtttttagtaatcgattgtttagtgtattaaaaagtggagattattttttacgaattttgtttgtagaggttaagttttgtttttggttgttagaaaagtttttgaaggtaaaatttttatatattttttaaaatatttatgcgaagagtaaaacgattagtaaatatattatttggaagttttagtagttaatgtttgttagttttttgtaggtgagttttgtttaaagttttaatagaatataattatttttcgtaataaggttatttttattatgtaaaattggttttagtttcgaaaagtaagagttgagatttttaaaggtagtgttattaatgtatgtgtacgtatatataaatatatatatatgttttattttataaaatatttataatataatttgtggagaatttaaatataatagaaatttattaatgtacgttgtagatttttttaagtagttttgaaaattagttttagtagttggagtagtgttgagttagaagtatttgttatgttttttgtttttttaatgaattttgttaaaacgtttagtgtagaaaatttagcgttttagagatttttagttaattttaaaataataattataagaaggtttagtcgatgatatttagggttttatagtttttttatatttgtgaattcgggtttggggatgttggttaagtttgtggttggttttttggtttgttgggagttgagtagtcgtagagttatatatatgtaaatacgtatttttcggaaggtagttattgtttatattagttgggtgatttagttttgattcgggtagtagcgagacgatatttttttatcgtcgtttagtattcgtcggttagttgtttcgaggtacgaatatttacgagcgtcgcgtaatcgtagtaggtggagcgggttttgagggagggtttcgcggcgtagatcgaaatagatcgggcggttcgggttatatacgtacgtatattttgttacgtatattgttacgtatacgtaattttacggttcgtttcggattatagagtattttttttttttgttgtaaaaggaaaataattggggaaaagttcgtagttaggaaagaagttgaaaatatttagttaagaagttagttaatttaaaaggaagaaaggggaaaaataaaaaaaaataataaaaaaaggaaggtttaacgtaggttaaggagaagtagtagaggttgatttttttttggcgtttttaggagtttcggaaagaagtgtttggcggcgtagggtcgggtagcgtggtgttttggttgggttcggtcgcggggcgttcgtttcgttcgcgttcgttggttttatgaatgagagtgtttggaaatgaacgtgtttttattgtaagttcggtcggaggaattttatttttttagttcgtttgtataggggcggtcggcggttaattataggttttttcggtattagttagggcgcggttcgtcgtcgtcggtttttggaattggttcgcgcgttttcgtcgtcgcgtcgcgcgttattgtacgtagttcgggcggggagtcggaggttattttcgcgtttcgtatttaagtttgtatgttggttcggggtttcgttcgcgtgcggattttttttcgtagttatacgtaggtttgtgcggtttcgcgagtggttacggttcggagatttggaaaaagaaagtaggtttcgtcggttcgaggaggattcggtcggcgcgtcgtattcggagaggttcggtttcgcgagtcgttgtaggtaggcgtagtggtcgttacgaggttttcgaatcgggttgtagttcgcggacggttttagattttgcgcggtcgtttagggttaggttttcgtttttagggcgggggtgcgatttggtcgcggggttcgggggagttatttcgcgtttttgtatcgttcggttggtagttgcggcgaagcggcgttgattttttgtatgaggtcggacggcgttcgcgcgtgtcgtttgtttttagcgtttttttttgggtcggtttttgtaatgggtgttttttatcgttgcgttcgggtcgcggttcgattttttcgcgcgttttatttgttgcgtgcgttagcggttagcgaagagttttttagttaggaaagattttaagaacgcgcggttggaaggaaagttgaaagtagttacgcggtttgttttcgggttttgtagcgtcggtattcgtagtagtcggatagtttgttcgggtttcgcgtttttttttcggtttttcggaagcggttttcgttttttttttcgttttcgtgcgttcgagcggttttaggtgcggaatttatttcggtttcgcgtgcgggcggtcgtttttttttgcgtcggttttcgcggtgttgcgggtattttcgcggagttcggagggtttcgttttcggttcggcgtgcgttgttaatttcgatttcgttcggcggggtttttttttagcggaggttgttttcgttattatgagtttttttacgttttttttgtcgggttttgtatttttcggggttttttatttatttcggggttgtaatttagttttcggatttcggtttcgttttatcgcgggttgttttgtggttttcgcggagttttttaattaagtttttcggcgcgggggtttttcgtcgattttacggggtttttgacgttcgttttttttttttttagggttagggtgttgtggtcgttgtcgcgtagggattgttttcgggcgttgtcgcgggttcggacgtaggagggggtcggggttgattggcgtggaggtttttttcgggcgggttcggattgcgcggagttgtcgggacgcgtcgcgggttttggcggacgttagggggtagtagtcgttttttttggacgtcgcgcgtagttttcggagttttcggaacgttttcgacggcgcggggttgtgcggttcgtttcgtggttttcgggtcgttcgggaagaattagcgttcgaggataaaagataggaagtcgttttagagtttatttgagttggaacggttaaggcgcgttttcgaggttttaatatagagtcgtagtcggttaggtggggattttcggattaggttttttcgttgtgcggttcggtcggggttttttttcgaagtttttgtttttggggtttgattcgggtcgtttttggttatttgtgttttaggagttcgggttttcggggggttaaggcgggcggttcgcggttttaatttttttcgttttcgttttttttgggtattgttagtattcgagtttagttttgttttaatggatttggggtttcggaaagaaaatttattatattttttttttaaaatgatttttttaagtttaattttagttgtaaattttttttttttttcgtttaaacgtttattttttaattttgtttttgagaagagtgtatcgcgcgcgttcgttcgttcgtaggggtcgtagcgtttttgtttgcgggttcggacgcggttcgttttagaggtaagttttgggtaagggaaattttttcgtttggtttttaatgtattttttcgagattttatttagggtttttggggttatttttacgtgtatttttcggaattttcgagatgcgggagggagtacgagggtgtggcggttttaaaagtaggtttttgattttaggggaaatagtagattcgggtgatttgtttttcggaaaggtttagggaggtttttttgggtttcgggtcgtttgtttaaaattttaaatttcgcgacgggggttgcgagtcggattcgggttgcggttttttaggagggagttaagtttttttatcgagtaaggaaagttggttttagttttgtatgtatcgagtttagtcgttagaggtagcgtcgtgggagttgtttagttaggagttttaatcgataaatttcgagtttgaagttcgataaaaagttgatagtaattatagtttttgttttttgattcgatgggatcgcgggatatttgggttttttcggagcggcgtaggttgttaattgcgtagcgcggtgtttttttgaaaagaagaaatagattaatttttgtttttttttattgaggatttaaaatgaatggaaagaggtaggggtttcggggaaagggaattttttagtcggtcgggtattttacggagtttgtatttttaaggatagttatagcgtgtacgaagtgaggaatttttttttattaagagcgtttattttagcgataatatagaatttttttttttttgtttaagggagaaaggaaaggaaatattattaggtttatttttagtgtttttttggagtaatgttagaatttatttttgttataatgtaaaattaaaaaaaaaaaaaatataacgaagcgatacgttgggcggatgttacgtgatagatttttttaaattttgttgcggggagagggagggaggagaattgaaaacggtttataataggaatgaaatgtatatttttgtagtggatttaaaaagtattgtttggttagttggaagaaaaataattttattggaaaatagtaatagtgtattgacgttttttttttataattttaggtaaagaattataggtggttttagaagataattaaattttttatttttttgtttttttaaaagtttttttaaaatatgtataaagatgggattagaattttaataatttttttaaaattattttttgcgagtaatatatttttaaaattatatttgtaaaaatgtagtacgtttaaaagaattatttttattttaaatgattatttatattttaaaaaatagaatgtattttgttatggtttggaattaaatagttgtagtttgtattgatgttatagggatggaaaataattttgatgaagagtaatatgtatgtataaattatttgttatatatattatttagttttgaatattggaatttaattaaatattttttttttttgaagtggttttgagattattttattttttaaatttaattattatgagaggggggaggagagtttttagtttttttattatattttttttttatttgaatgtttttgtgggatgttatggttaatgtgtgatgattttatttttattttataaatttattgtgtattttataagtagtaagttgaggatattttaaaattaatttttttaaaatttaggaatgtttagtaaatattttatttttataaaaattttgtattattattgttataatataggtaataagttgggttgtgagggaagttaagttttgttttgtttttagagagttgtatagaggtatttaatagtattagaatgtatttatggtaaacgttgtagaattgagggtattatttaagtttttattgaaatattttatatggtataatatttataatatggagaattgtttttaagtatattggaattagtagaaatagttttaattatttggttaaattatattataagttatatatagagatatatagatataaaattatatatatatttatgaaggtgtgtattttatttaaaaatataatttggaatttaatatatcgtggacgtttttagaaggatttattttaagtatgtattttgaaataatagaaagtaggaaaataaaagtaatgtaagtttaaaaattaattttttttcgatttttttttttttgttagtttatttttttttatattttttagtattggagatttttatagttttgatataaaaatgatttgaaatagtaaattattaaataagaaataaattgttttttatgtacgtggttttaggtatttttaattaatgtttttttttattagttaatattgaatatttgttatagaattattttttttaagtttcgtgtgtgattaaaatgtgatttatttaatgaagatttaaaatatatttggaaggtgtaggaatattagaatttaagggaaaattaaaattaaattttaatttaacgtaaaaatatttatgattatttatttttaatgataggatattttagaaatatttttttttgtttatttttttttttttttttttgttaggtaggtaaattatttatatcgaaattttttataagttttaatagattatattaattattattagaaataattgttatatgataatttttaaatatggattatttatagtatatatttataattataggtaaatttattaagtaaagttatatgaagtttttttttttttttttgaatatttatatataatgttgtgaatttgaaattattttattagttttgtatattgataatagtattgagttataaagag

SEQ ID NO: 2059 - DNA, 5928 bp, Artificial Sequence
  chemically treated genomic DNA (Homo sapiens)
gtttaaggttgtatggttaggatgattttattatttttaggatgattttagtttttttttgagaatgtttaagttgttaaaaaaaagaaaaaatgtgtttgtaataattaatttttgataataggtttttgattgtttttttttaaagtatttattaaaaacggtttagagttgtgaattttttcggtttttttgagatgtattttttatttaggagtgttttttggttaggtgtggtggtttacgtttgtaattttagtattttgggaggtgaaggtaggcggattatttgaggttaggagttcgagattagtttggttaatatggcgaaattttttgtcgattaaaaatataaaaagttagttgtgcgtggtagtatacgtttgtagttttagttattcgagaggttgaggtaggagaattttttgaaattgggaggtagagattgtagtgagtcgagatcgtattattgtattttagtttgagagataagagagaaatttcgtgttaaaaaaaaaaaaaaaagaaagaatgttttttttaaggatttgaaagttatttttttgaaatgtaattattagaaatgatacggtttttgttttttagtttttatagtgggagaatagaattttaattttgttaattgttagttaatagatatagttggtttaattaatatttttattgagtaatttttggtaatttgttatttttttaattttttttattttttgattttttattttttttttaaaaggtatagttatttttgtataaatgaaagtttgtttttattggatttttttttttattataggagtttattattgattaaaatttgtttttattattttagtgtttggttttattttttatagaatttagtaaattgtttgagttaaataattattaagtatttaagttatagattgattttaggttttaaagtttatggtttatcgttgtagaaaggtttattgaatattttaaataagtataaaatgtaagaggaatatagttagtgttaagtagattcgtgagggtaattaattaaaggaacgatttggagaattttatagtttataatttaataatattattttttaatatttttttttttaatatatattatggaattgtgttttgggtttttttgtttttgtttttgtttttagattcgggggtatatgtgtaggtttgttatattagtgtattgtttgatgttgaggtttgggtatttaatgtttttaagtagaaaatatagtatttaatagttcgttttttaatttttatttttttttttttttttttggaattttcggtgttattgttattattttttgtgtttttgtgtatttaaatgtttagtttttatttataagggagaatatgcgttatttggttttttgtttttgcgtttgtataatagtttttagttgtatttatgttgttgtaaaggaaatgattttatttttttttgtgggaattatgttttttagttgttttaaattagtgggtagtagtgttcgtttgggtagtatatatattaaaatcggaatgatatagataagatttagtatggtgtttgggtaaggatgatatgtaaatttatgaagcgttttattaaaaaaaaaatagtgggtagtaaagatatgaatttattttataggttaattgatgtgataaaattttttatttatatagtatttaatatagttttagatttttgatttttataattaaggtatgttttttaatttagttaatagtagtaatagtagagatttggaaattttatttttaaatttttgttttattttttaaattgtttagaatttagataaggtgttatatattggaggttttttatatatattattagaattaagatttagatgtaagagagataataatataaaattatttaagtagagtttaatttataggttttaaattatgttttttaaaaataaatttttaaaaagttttttatagttaaatttattagatatttatgattttttttttatttttatgtttataaaagaaagtatttttttttattgaaaataaaatttttatttttgtttttttttagttgttttatggatttatttataaattattgttttttttttttcggaaattatttagtgtatgttgtaagggattttttttttttttaattattatgttttttttttagtgttaattttggaataatttttttttttattagttgttaaattatttttattatatagtaaatttttgttaatatatattttatatatttttcggagtattttgtttaatgtatttgttaatttttatgttggttttagttttaaaaaaataaattagatttaaatttatgatttatagtttttataggatttgttttttgaaatagtaggatttttattttgtttaaagttttttgtatattatgtgttattgttgattggtttttttaataaatttaatttatttattttaatattaatttatattagttatagaagatagtagttagtgtagtggagagaatttagttaatgatagatttaatacgtatatattgggataggaaagaaaatttaaaatagagttttgaattattttgagtggaaaaaaaaaaattaaaaataaaatattataaattgtatgattttatttatgtaatatttttgaaataataaatttgtagaaatggtgaatagattagtggttgttatgaattagagttggtttggggagtaatagagaggtatgtttggtgataaaagtgtaataggagggttttttgtgttaatagaaatatttttatttaattatagtggtggatatataaattaatatttgataaaattatataggattaaatatatatataaagtatatattaaattggggaaatttgagtatgattggtggattgttttgttgttaatatttttattgtgatgttgtattatatttttgtaatatgttattattgagtgaaattgagtaaagggtaaggaatttttgtattattttttataattgtatgtgattttataattagttcgataaaaattttagttgaaaaaaagtaagggtttttttttgattattaatttgttttaaagtaattgattggaaatttattttgaaattgtaatgtaattgtaatttatttaaagtagtggtgtttaatagatttttttgtaaggatggaaatattttaaatttgtattgtttaatatagtgattattaatatatgtatatattgagtattggagatgtggttagtgtaattaaaaaattgaattataaattttgtttaatttgaatttatgtttaaatggttatttgtgatagtggtaatttatgggatagtatagaaatgaaatttgattttatttttaatttttttgtaagtaggaaggaggaatatttattttgaaattatgtaattgttttataggatagatgtttatggtttttttttttttttttttttttttttttgagagggagttattttgttgtttaggttggagtgtagtggtatgatttcggttcgttgtaattttcgtttttggggtttaagtaagtaattttttgttttagttttttaagtagttgggattataggcgtttgttattatatttagttaatttttgtattttttttttttttttttttttttagtagagatggggttttattattttggttaggttggttttgaatttttgattttatgatttatttattttagttttttaaagtgttgagattataggcgtgagttatcgcgttaggtttggttttttttgaataaataaattgatttttttagtttaaaaatttgagaaatttatatttgttttatttgagttttttttttagggaattagttattagtttttttagatagtattaaggaattgaaatttatcggattattatatttggaaaattagatattagattttttatttgtaataattgtttgatgtttgttgatttatttttttttatttttttttaatttttgttatttttttatatgtagttatattttttttttgttatattttaattttaattagttgagaagatggatttgagattgattttttttttttaggttgtagtatttaaataatgtttttttttttgataataatggggttttagtgattggttttttgtgttgtgaattattagatttagattaaatttttggtatttttttaataattttttattattgaattaagttataaattttgaggatggatttttgtttttttattttaagatggggattaaaaggtatattttagagtgttattgttcgtgtaaaatagggttgtgaaattttttatatttatgtatagataaattgatggttttgtaaatgtttagagaagtaattttataaagatttagtgaatgttttttattattattggaaaatttggttaagttagtagttttgtttttatatatttagggggaaaattaataaaaatttgatgttttgttatttttttttagttttttttgtaattttagttttaaagattgtagtttttgtagtatttttttttttagaatattaggaaaaaaagaaaaaaaaattatgtaaatgtattatttttttaaatataattaggaatgattgaatagttgggagaatatgaagaaaattttttagagaattaagggtaagtagtgagtttagatttaggtatatggttattaggaatggttttttattgttacgtgggtagttaatagttagtagttagagattagtttcggttttcggtttgcgggttttgtaaagttaggttagttggtttttcgtttgtttcgtatttcggcgaggtttcggtggggaggggtagggatggtttagtttcgtttcgttagggcggggtttgcgtttgcgcgtttagcggtcgggcgtgtaatttacgggtgcgcgtttacgatcgttagattcgagtagtttttggaatacgttgcggggttttcgggtttgagttaggtttgttttttacgtaggtgtttcgcgcgtttcgtttagttatgtcgttcggtatttatgtagcgttggtgattggaggtaataagggtatcggtttggttatcgtgcgcgatttgtgtcggttgttttcgggggacgtggtgtttacggcgcgggacgtgacgcggggttaggcggtcgtatagtagttgtaggcggagggtttgagttcgcgtttttattagttggatatcgacgatttgtagagtattcgcgttttgcgcgattttttgcgtaaggagtacgggggtttggacgtgttggttaataacgcgggtatcgtttttaagggtatggggaggggacgtggttttttcgaagaagaatcgatgtattggggtttttggcgtttgcggggtttataacgtttttttagggaggagagggaggagttaggagatgtagggagtgtagaaattttggagaaagtgagagttttttagttaaagggaattttgtgtttttttggttgggatttttggggattttttttaggttttttgtagtttttttgaattgagttttaaggtaattggatggattttgaattgattttaaaataaacgataaattgtaaaaagaaaaaatggttatgttaagatttagtgtgtgtattttttatttttttttttttaatggtgttattttataaaaatattagaatatgattaaattaggagattgatattggtataatattgtaattagatatagatttattttaggtagagggtattaagtttttttttttttttttttttttttttagtattattgtatagaattttattttatgggtataatgtattaattatgtttttttttttttttaaaagt

SEQ ID NO: 2060 - DNA, 5928 bp, Artificial Sequence
  chemically treated genomic DNA (Homo sapiens)
atttttaggagagaaagagaatatagttaatatattgtatttatggggtaaaattttatataatgatattaaaaaaaaaaaaaaaaaaaaaaaaaaatttagtgttttttgtttaaagtaagtttgtatttggttatagtattgtgttaatgttaattttttggtttgattatgttttagtatttttgtaagatggtattattgggggaaggaggatgaagggtgtatatattggattttggtataattattttttttttttgtaatttgtcgtttattttaaaattagtttaaaatttatttagttgttttaaagtttaatttagaaaaattgtagaaaatttgaaaaagatttttaagagttttagttagggaaatataaagttttttttggttggaaaatttttattttttttaaggtttttgtattttttgtattttttagttttttttttttttttttagggaggcgttatggatttcgtagacgttaggagttttagtgtatcggttttttttcggggaggttacgttttttttttatatttttgaaggcgatgttcgcgttgttgattagtacgtttaggttttcgtattttttgcgtaggaagtcgcgtagggcgcggatgttttgtagatcgtcgatgtttagttggtggaagcgcgggtttaggtttttcgtttgtagttgttgtacggtcgtttggtttcgcgttacgtttcgcgtcgtgagtattacgtttttcgagaatagtcggtataggtcgcgtacgatggttaagtcgatgtttttgttgtttttagttattagcgttatatggatgtcggacgatatggttgaacggggcgcgcggaatatttgcgtggagaatagatttggtttaggttcgggagtttcgtagcgtgttttagagattgttcgagtttggcggtcgtgggcgcgtattcgtgggttatacgttcggtcgttgagcgcgtaggcgtaggtttcgttttagcggggcggggttgaattatttttatttttttttatcggaatttcgtcggggtgcggagtaggcggagagttagttagtttgattttgtagaattcgtaggtcgaagatcgaggttggtttttagttattggttgttggttgtttacgtggtagtgaagaattatttttagtggttatgtgtttagatttgaatttattgtttgtttttggttttttgaggggttttttttatatttttttagttgtttaattatttttagttgtgtttgaagaaatagtatatttgtatggttttttttttttttttttttggtgttttaaaaaaaaaaatattgtaggaattgtagtttttggagttagagttgtagaagaaattggaaggaaataatagggtattaagtttttgttgattttttttttaagtatatgaaaataaagttattgatttagttagattttttaataatggtgggaaatatttattaaatttttataaggttatttttttgggtatttgtagggttattagtttatttgtgtataggtgtagggggttttatagttttattttatacggataataatattttaggatgtattttttaatttttattttaaaatgaagaaatagggatttatttttagaatttataatttagtttagtggtgggaaattgttagagaaatgttaggagtttggtttaggtttggtggtttatagtatagaaagttagttattgagattttattattgttagggaagaaggtattatttgggtgttatagtttaggggggagagattagttttaaatttatttttttaattgattaaaattaggatatagtagggaagaaatgtaattgtatgtgggaaaatagtaggagttagggagagatgaagaggagtgggttaataggtattaggtaattgttgtaggtgaggggtttggtgtttgattttttagatgtggtgattcgataagttttagttttttggtgttatttgggaggattgatggttagttttttgagaaaggaatttagataagataaatgtaaattttttaagtttttagattgggagggttaatttgtttatttaaaagagattaggtttggcgcggtggtttacgtttgtaattttagtattttgggaggttgaggtgggtggattatgaggttaggagtttaagattagtttggttaagatggtgaaattttatttttattaaaaaaaaaaaaaaaaaaaaaaaatataaaaattagttgggtgtggtggtaggcgtttgtaattttagttatttgggaggttgaagtagagaattgtttgtttgaattttagaggcggaggttgtagcgagtcgagattatgttattgtattttagtttgggtaatagagtgatttttttttaaaaaaaaaaaaaaggaaaaaaaaagagattataaatatttgttttatgggataattgtatggttttaaagtgagtgttttttttttttatttataagggaattgggaataaggttaagttttatttttgtgttgttttataggttgttattattataggtggttatttaaatataaatttaaattaagtaaaatttgtaatttagttttttagttgtattagttatatttttagtgtttaatatgtgtatgtgttagtggttattgtattgggtagtatagatttaggatatttttatttttgtagaaaggtttgttgaatattattgttttaaatagattgtaattatattgtaattttaaggtaggtttttaattagttgttttaaaataagttaataattaaggaaagatttttgtttttttttaattgaaatttttgtcgagttaattatagagttatatgtagttgtaagaaataatatagagattttttattttttatttagttttatttaatagtaatatattgtaaaagtatagtataatattatagtgaagatattgataataaaatagtttattaattatatttagatttttttagtttgatgtgtattttgtgtatgtatttagttttatataattttattaaatgttggtttgtgtatttattattatagttaaatgaaaatgtttttattagtataaagagtttttttgttgtatttttattattaaatatatttttttgttattttttaaattaattttaatttatggtaattattaatttgtttattatttttataagtttgttgttttaaaaatgttatatagatggagttatatagtttgtagtattttgtttttggtttttttttttttatttaggataatttagagttttgttttggatttttttttttattttagtgtgtgcgtgttgggtttgttattggttgggttttttttattgtattagttattgttttttgtagttggtgtgagttagtgttagagtggatggattaaatttattaagagggttagttagtaatagtatatggtgtatagggaattttggatagggtgagggttttgttgttttaaaaggtaaattttatgaggattatgaattatgagtttgagtttgatttatttttttaggattggaattaatataagaattgataggtatattaggtaggatgtttcggaaaatatataaaatatatattaataagaatttattgtatgataaaggtggtttaataattagtgagggaaagaattattttaaaattagtattggggaaagggtataatgattggaaagaaaaaagattttttataatatatattaaataattttcgaagagagagaaatagtgatttataaatgaatttataaaataattaaaagaaaataaaagtaaaagttttatttttagtaggggaaaatgtttttttttataagtataaaaataggggaagaattataaatgtttgatgggtttgattatgggaaattttttgaaaatttgtttttgaaaagtataatttaaagtttgtgaattaagttttatttggatggttttgtattgttgttttttttatatttgggttttgattttggtggtatgtgtgaagagtttttaatatgtagtattttgtttggattttgaataatttaagaaataaaatagaaatttaaagatggagtttttagatttttgttattattgttattggttaaattggaagatatgttttagttgtgagaattaaaggtttgagattatattggatgttatatagataaagaattttattatattaattaatttgtggaatgaatttatatttttattatttattgttttttttttaatggaacgttttatgaatttgtatgttatttttgtttaggtattatgttaaattttgtttgtattatttcggttttagtatatgtgttgtttaaacgagtattattatttattagtttaaagtaattaaagaatatagtttttataaaaaagaatggaattattttttttgtagtaatatggatgtagttggaggttattgtgtaaacgtagaaatagaaaattaaataacgtatgtttttttttataagtgggagttaaatatttgagtatatagggatataaaagatggtaataataatatcggggattttaaaagggggagggagggggtaagggttgaaaaacgaattattgggtattatgttttttatttgggagtattagatgtttaaattttagtattaggtaatatattgatgtaataaatttgtatatgtattttcgaatttaaaaataaaaataaaaataaaaaagtttaaaatatagttttatggtatatattaaaagaaaagatgttggaaaataatattgttaaattatgaattgtgaggttttttaggtcgtttttttgattagttatttttacggatttgtttgatattggttgtgttttttttgtattttatgtttgtttaggatatttaataagtttttttatagcggtagattatggattttgagatttggaattaatttgtggtttaggtgtttagtagttatttaatttaagtaatttattgaattttgtgaaagataaagttagatattaaggtggtaaggatagattttagttaataatgaatttttgtaataggaaagagggtttagtggaaataaatttttatttgtatagagatgattgtgttttttaaagggagagtgaaggattaggaagtgggaggagttagggaaatgataaattgttaagggttgtttagtggaaatgttggttaggttagttgtgtttgttagttggtaattagtaaagttgggattttatttttttattataaagattgaaagatagaggtcgtattatttttgatgattatattttagaggaatggtttttaggtttttgagaaagatatttttttttttttttttttttttgatacggagttttttttttattttttaggttggagtatagtggtgcgatttcggtttattgtaatttttgttttttagttttaagagatttttttgttttagtttttcgagtagttgggattataagcgtgtgttattacgtatagttaattttttgtatttttagtcgataaagggtttcgttatgttggttaggttggtttcgaatttttgattttaggtgattcgtttgtttttattttttaaagtgttgggattataggcgtgagttattatatttggttaagaaatatttttgggtgggagatatattttaaagggatcgagagaatttatagttttaagtcgtttttagtaaatgttttaagaaagggtagttaggggtttattgttagaagttggttattataaatatatttttttttttttttggtagtttaaatatttttaggaaggggttagagttattttaggggtgatagggttattttagttatgtagttttgagt

SEQ ID NO: 2061 - DNA, 7977 bp, Artificial Sequence
  chemically treated genomic DNA (Homo sapiens)
gggagatagagcgagattttgtttttagaaaaatgaaagatataggttgggtgcggtggtttacgtttataattttagtattttgggaggttgaggcgggtggattatttgaggttgggaattcgagataagtttgattaatatggagaaattttgtttttattaaaaaatataaaattagttgggcgtggtggcgtatgtttgtaattttaattattcgggaggttgaagtaggagaatcgtttgaattcgggaggcggaggttgtagtgagttaatattatattatagtattttggtttgggtgatagggtgagattttattttaaaaaaaaaaaaaaaagaaagaaaaagaaaaagaaaagatatagtattagtaattgaaggtgggatgtgggggtgtgggggtggggtagatacgtagaacggggagtaggaattttgtttgtttaaatgtagagtggagagatggcgtgaaagtgagtgagtgtatacgttattttcggaaaatgatatagcgttgttggaagacgtgtagttaatttgagatacggatcgtttgtatttttgggttagtagattcgttttttaagttaaaaggaataaatgtaattaaagaagtgtgagatttatatattttaaattttaaaatattattgaaagaaattaaagatttaagttttttttggacgtttgggtttaggaattttttttttagaacgattttggttatcgatttatataaatttttttttttttttatatttaaagggtattgttgttatagtgttagttttttagtttttcggatgttttagttttttattttagaattttttatcggtagttttttttttttagtgacgttgtttgtttatggatttattagttttttattgtttttgtcgtttgttgtttatttttttcgttttatttagcgtagatttttgtaaataaacgtagtttagtttttcgtttgtgtcgttttttattaatatatttagataaaattttatttttatacgtaatttagtttgtaaatagttttagtttcggtggtttttagtaaagggtattttgttttttttttgtcgggttttgtagggttgggtttcgggttgtaggttgaggttagggtcgttgtttttgaggttttagttgtaaataggtatatttttttttgttgtgtgttttaaggggtgaagtaaattacggtttagtttaaatttaaagggtgggtaagttttcgttattgtcgtgatttgggtagggagagagaatttcgtaaatatatacgattatttttagcgttttttttttgttttgttacgcgggttatttatcgtagttagagaaaagtatagtcgtgttgttaggggtttgggaaatttgtgaatggaaattcgtaggagtttttagtgttgtttattttttttttttttttttttttttttttttttttttttttttttttttttttttttttttttttttttttttttttttttttaattttttttagttttgagggtttagtttttcggttattaggggatggtgtaggtttaggttttttttttttgttcgttttttagtggggtagcggtttattttttgtttatttatgatatgtgtattttttgtatacgtgttatattttgaataaaagtaataataataaaattttttattagttcggtttcgttgtttatttgttgttgattagttgttaggtttatttttttgaagaaatagaggtgattagaaggaagtttttttattttgtttataggacgttagtatttttgtatttttggttttgagtttttttttagtataatgtggtgggttaggtttttttgggggttttgtttttgtagtgtttttttttatgtaggtagatatagaaatgaggtagaggttagaaaatgatgagggtcggggagatgtgttttttttttttttttttttttttttttttttttttgagatggagtttcgtttttgttgtttaggttggagtgtagtggcgcgattttagtttattgtaatttttattttttaagtttaggcgatttttttgttttagtttttcgagtagttgggattataggtgtttgttattataattagttgtatttttttttttttttttttttttttttttttttttttgtatttttagtagagacggggttttattatgttggttagggtggtttcgaatttttgattttaggcgatttattcgttttggttttttaaagtgttgggattataggcgtgagttattgcgttggttagtttttgtatttttagtagagattagagacggggttttgttatgttgattaggttgattttaaatttcggattttaggtgatttttttattttggttttttaaagtgttgggattataggtgtgagttattttatttggttattcgtgtatttttagtggttaggtgtagtttttttattttaaaataggatttacggtttatattgatataattaagtgaataaataaatgagggagaaggaaaattttaataatggaatgttaaatggtatatggaggagtgatgggtttagaaaaattattatttagtaattattttattttattttattttatttatttatttatttttttttttttttgagacggagttttgttttgtcgttaggttggagtgtaatgatataattttagtttattgtaattttcgagtttttggtttaagtgatttttttgttttagtttttcgagtagttgggattataggtacgtattattatgtttagttaatttttgtatttttagtagaggcgaggttttattatgttggttaggatggttttaattttttgatttcgtgatgcgttcgttttagttttttaaagtgttgggattataggtgtgagttatagtttagtaattattttaataaaaattaatttagataaaattattagtaagtgttaaaattagagagtgggttggttgtagtggtttatttttgtaattttagtattttgggaggtcgaggtaggtggattatttgaggttacgagttcgagattagtttgtttaatatggtgaaatttcgtttttatttaaaaaaaaatataaaaaatagttaggtgtggtggtaggtattcgtaattttagttatttgggaggttgaggtagaagaatcgtttgaattcgggagagggaggttgtagtgagtcgaaattatattattgtattttagcgtgggggggaggttgtagtgagttgaaattatattattgtattttagcgtgggtgatagagaaagattttgttttaaaaagaaataaaataaaataaaataataagttagagaaattagatagattgagtgatagatttatatatatttgtatacgtgtgtgtgtgtgtgtgtgtgtgtgtgtgtgtgtggagagatagagagggagtaaatgtagtaaaaatttaatatttgaaataataatgagtttttgataatagaagtaaaaaaaattaatatttggaaaatttggatgagggaatatgatattttgtatggtttttgttatttttttaatttaaaattacgttaaaatttttaaaaaattaaaaagtatttgggttgtgtaataaattattgtaaatttgagtggtttaaaataatatatattgggttgggcgcggtggtttatttttgtgagtttagtatttttgggaggtcgaggcggatggattatttgatgttaggggttcgagattagtttggttaatatgatgaaatttcgtttttattaaaaatataaaaattagtttggtatggtggtgcgtgtttgtaattttagttattcgggtggttgaggtaggagaatcgtttgaattcgggaggttgaggttgtagtgagttaagattttattattgtattttagtttgtgtgatatagattttgttttaaataataataataaaaataatatcgtttattatttttttttttcgtaggttggttgaaggttttgagggaggttttggttattttttttagttttgtggaggtcgttagttatttttgttatttttcgtttggtggtagtatattttatttttgtcgttatttttatatggttttttttttttcgcgtgtttgtgtttacgtttttttttttataaagattggataggatttttttttttttttttttttttttttttttttttggagatagtttcgtttagtcgtataggttggaggatagtggcgcgatttcggtttttaatgttattttttagagtttttatgatgtaattttatttttgttttttttttatatcgtcggttttattgtttttcgtgttagtttttgttagtggatatttaattttaatttacgttttatttttttttttattgtgagttttacgtggtagagatcgcggcggagttgcgcgggtcggaggaggttgcggagtatcgttttgatttgagtcggggacgttgcggaggcgtagtacgtttttttgtttagagttgatgggtatcgttcgtgtttttcgttgtaggttcggggggagattcgggggtttgggattttttatttagttatagggcggggggattaggtttagtttttgaaagtttagagtacgatgtttgggaaacggtttcgttcgcggttttcgggatttggcgaaggagtttcgcggggcgtttttgttattattttgcgcggagtcggtttcgttttcgagagcgttcggtagtttttggtcgtgggtcgtatcggagtcgcgtaaggcgattgttttgcgtttcggttcggggttcggattcggttttgggcgcggttacgcggggcgttgcgtacggcgttcggcggttatagagcgcggttatcgagtttcgtttcggcgcggcgttttttttcgggttcgcgatatacgttttcggggtcggttttcgaggacgcgtagggttttttatttattaggacgtacgttttaagtttattagtaaaggttttttaaattttcgaagggtaagaagttaattaagtaaaatagtatcggaatattaggtagaagatattatcggggttcgcgggtgggggtggttggaattcggggcgggcgggtttaggcgaagaggaaggcgggggagggggcggcgattcgggtttgcggttgaattaatagggcgtgggaatggggcgggcggattggggtgggggtatgtcggggtttcggggagggcgggggtcgggtaggtcggagggttttaggttgcggcggggtggggaaggggtgggggggaggggttcgggttgggtggggtggaggaggggttgggggggcgggtgttttgttacgagatattggtcggcgtcggttttcgttttcgttttttcgttaattatcgttcgtttgtttttttcgtcgtgggttttcgcgaggtcgttatttcggggtcgtcgttttcgtttcgtcgtagtcggggtagtcgttcgttttttttttttatgtattcgtttaggtgagattcggttttatcgagattcgtttttttttttggatagaggattttaattgggtttcggttttttttttcgcgttttcgtttagagttgtattatttgtatcgaaaggcggcgagatagggttttttaagattttcgttttatcggcgtttacgtttgcggttttgatcgtttagaagatgggggttggtcgtgtacgtggtttcgggtttttattttagttttcgcgtcggcggagtggattttattggcggcgagttttggagcgtggagtagggacgcggggtgggaattcgggggagatgtacgtttcggtgtttagtattgagttcgttgtattgtggatgggaaatggttgtttgtaaatcgttttttttggcggatcgtgtggggtggcggtaaacgttgtcgttgcgcgggcggtacgcgaggtgggtgttcgttgggggagggacgcggggttttgtttaggttgcgttcgggggatggaggtttttttgggattttatttttttgagttttaggcgagatcgtagttgagttgtaggatgtaagcgggaggcggagcgtgggtgggagagcggagcgcgaaattttcggtttttcgaggattttttgggtttatttgtttttagttttgttttaaagtgtcgttttcggaggcggagtggtcggcggttttcgggttttagtagggtttggattttttatttggaaatttagaggagtttttcgtttttcgtgcgcgtggttttttttaggttttttcgggagtgttggcgcgcgagtgtaggggtgtttcgggaacgtcgtgattttaagggggttttgtggtttaaggagcgaacggaatcggttaggcgatgttagttgaattcgttttttcgggacgtacgtgtattcggtcgttcggcgttgttgttttggggagttcgcgggttcgggtttgggtcgtttggcgagtttttcgtcgagcgtttttgagttttatagagtttcgacggtttgcgatttgcgttttcggtagttttttattttgcgagagagggttttagggcgaggcgaggggttaaaagtaaggcgttgggtcgtttgcgtttgtcggggtttcgggtttacggttttttggaagattcggcggcggagtatgcgcgttttaggttagatagggtttgtgttagacggagagttttttttcgtaggtgattttcgcgattcgcggaggaaggtgttgtttcgtttacggcggcggttttttataaggttgggatagaaagaaaagcgtgggatacgaatttttgaaagcgggtgtatttttttggggaagagaagatttaacgttttcggatttttagataagttcgtggttttaagattttgaaagtattattttttagggtcgtttgaagtcgttttggtttttagtttggtgaattgtaaaggtggaggggaggttgggaagtttaggaggttaagttgaggtttgggtagggtttgtgcgtagagattatttgaatagtatattttaagggtttttaaaggtagtcggttttcgtaatttttttttttttaataggttttttaaaaaaaaagtagttttaggtcgggcggggtggtttatttttataattttagtattttgagaggttaggcgggcgaattatttgaggttaggagttcgagattagtttggttaatatggtgaaatttcgtttttattaaaaatataaaaattagtcggatgtggtggcgggcgtttgtaattttatttaggaggttgagataggagaattgtttgaattcgggaggtggaggttgtagtgagtcgagatcgtattattgttttagtttgggtaataagagggagatttcgtttcgaaaatttaaaaaagagtagttttagatttagaaaaattgaaaaaatagatagagtttttttagttttttttgttattaagattttaaattgatgtcgtatatttgttattttatttatttttttttatttttatttttatttttattttttgagacggagtttcgttttgttgttaggttggagtgtagtggcgcgatttcggtttattgatttttttttttcgggtttaagcgatttttttgttttagtttttcgagtagttgggattataggtgtgcgttattatgtttggttaatttttgtagttttagtagaaacggggttttattatgttggttaggatggtttcgattttttgattttatgattcgttcgtttcggttttttaaagtgttgggattataggcgtgagttatcgcgttcggtttatttgttataattaatgagttaattttacgattatataattattgttgatattaattaaagttcgcgtttgagttagatttgtagagttttttttttattgtttttttttattttagg

SEQ ID NO: 2062 - DNA, 7977 bp, Artificial Sequence
  chemically treated genomic DNA (Homo sapiens)
tttggaatagaaaagggtagtgaggagaaaattttgtaaatttgatttaagcgcggattttggttaatgttaataatggttatgtgatcgtggaattggtttattaattgtaataaataggtcgggcgcggtggtttacgtttgtaattttagtattttgggaggtcgaggcgggcggattatgaggttaagagatcgagattattttggttaatatggtgaaatttcgtttttattaaaattataaaaattagttaagtatggtggcgtatatttgtagttttagttattcgggaagttgaggtaggagaatcgtttgaattcgggagggggaggttagtgagtcgagatcgcgttattgtattttagtttggtaatagagcgagatttcgttttaaaaaataaaaataaaaataaaaataaaagaaaataaataaagtaataaatatacgatattagtttaagattttaataataggggaaattgggggaattttatttatttttttaatttttttaaatttaaaattgtttttttttaaattttcgagacggagttttttttttgttgtttaggttggagtagtggtgcgatttcggtttattgtaatttttatttttcgggtttaagtagtttttttgttttagttttttgagtaggattatagacgttcgttattatattcggttaatttttgtatttttagtagagacgaagttttattatgttggttaggttggtttcgaatttttgattttaggtgattcgttcgtttagttttttaaagtgttgggattataggagtgagttatttcgttcggtttaaaattgttttttttttaaaaagtttattaaaaaagaaaaagttgcggaagtcggttgtttttggaagtttttggagtatgttgtttaggtggtttttgcgtataggttttatttaggttttagtttggttttttggattttttagttttttttttatttttgtaatttattagattgggggttaaagcggttttaaacgattttggagggtggtgtttttaaggttttgggattacggatttgtttgaaaattcgaaggcgttggatttttttttttttagaaaaatgtattcgtttttagaggttcgtgttttacgtttttttttttattttaattttgtaagaagtcgtcgtcgtgagcggagtagtattttttttcgcgggtcgcgggagttatttacgggaagggatttttcgtttggtataggttttgtttggtttggggcgcgtatgtttcgtcgtcgaattttttagaaagtcgtggattcgaggtttcggtagacgtaggcggtttagcgttttgtttttggtttttcgtttcgttttggagttttttttcgtaaggtaagggattgtcgggaacgtagatcgtaagtcgtcggggttttgtagaatttagaggcgttcggcggaaagttcgttaggcgatttagattcgaattcgcgggttttttaagataatagcgtcgggcggtcggatgtacgtgcgtttcgggaaggcgggtttagttggtatcgtttggtcggtttcgttcgttttttaaattataagatttttttggggttacgacgttttcggggtatttttgtattcgcgcgttagtattttcggaggggtttggggaaggttacgcgtacggagagcgggaaatttttttaggtttttaggtgggagatttagattttattgagattcggaaatcgtcggttatttcgttttcggaagcgatattttgggataaagttggggataagtaagtttagaagattttcgggaagtcgagaatttcgcgtttcgtttttttatttacgtttcgtttttcgtttgtattttatagtttagttgcggtttcgtttggggtttagggaagtgaggttttaggaaaatttttatttttcgaacgtaatttgggtagagtttcgcgttttttttttagcgggtatttatttcgcgtgtcgttcgcgtaacgatagcgtttatcgttattttatacggttcgttaaaaagggcgatttgtaaatagttattttttatttataatgtagcgaatttaatgttgggtatcgaaacgtgtatttttttcggatttttatttcgcgtttttgttttacgttttaggattcgtcgttagtggggtttatttcgtcggcgcgggggttggggtgggagttcggggttacgtgtacggttagtttttattttttgggcggttaagatcgtaggcgtgggcgtcggtggggcgggggttttgggagattttgtttcgtcgtttttcggtgtagatgatgtaattttgggcggaggcgcggagagggaaatcgggatttagttgagattttttgtttagagaggggagcgagtttcggtggggtcggattttatttggacggatatatggaaaagaggggcgagcggttgtttcgattgcggcgaggcggagacggcgatttcggggtggcggtttcgcggggatttacggcgaggggagtaggcgggcggtgattggcggagaggcgggggcggaggtcggcgtcggttaatgtttcgtggtagagtattcgtttttttagttttttttttattttatttagttcgggttttttttttttattttttttttatttcgtcgtagtttgggatttttcggtttgttcgattttcgtttttttcgggatttcggtatgtttttattttagttcgttcgttttatttttacgttttgttgatttaatcgtagattcgggtcgtcgttttttttttcgttttttttttcgtttgagttcgttcgtttcgggttttagttatttttattcgcggatttcggtggtgttttttatttggtgtttcgatgttgttttatttggttaattttttgtttttcgggaatttaaggaatttttattgatgagtttgaaacgtgcgttttggtgggtggggggttttgcgcgttttcgaggatcgatttcgagggcgtgtgtcgcgggttcgggagggggcgtcgcgtcggggcgggattcgatggtcgcgttttgtggtcgtcggacgtcgtgcgtagcgtttcgcgtgatcgcgtttagagtcgggttcgaatttcgagtcgaggcgtagaatagtcgttttgcgcggtttcggtgcggtttacggttaggggttgtcgggcgttttcggggacggggtcgatttcgcgtagggtggtagtaggggcgtttcgcggggttttttcgttaggtttcggaggtcgcgggcggggtcgttttttaaatatcgtgttttggatttttagaggttgaatttgattttttcgttttatggttaaatgggggattttaggttttcgagttttttttcggatttgtagcgaaagatacggacggtgtttattagttttgggtagaggaacgtgttgcgttttcgtagcgttttcggtttaggttagagcgatgtttcgtagtttttttcggttcgcgtagtttcgtcgcggtttttgttacgtggggtttatagtaggggagggagtgagacgtgaattagaattaaatgtttattggtaggaattgatacgaagaataataaagtcggcgatgtggggaggggatagggatggagttatattatgaaggttttggaaggtggtattggaggtcgggatcgcgttattgttttttagtttgtgcgattgagcgagattgtttttagaaaaaaaaaaaaaaaaaaaaaaaaaaaaaaaaattttgtttagtttttataagaagagagacgtggatatagatacgcggagagaaaaaggttatgtggagatggcggtagagatgagatgtgttgttattagacgagaaatggtagggatggttggcggtttttatagggttgggaaaggtggttagggttttttttagagtttttagttagtttgcgggagagaaagatgataaacggtgttgtttttgttgttgttgtttgagatagagtttgtgttatataggttggagtgtaatggtgagattttggtttattgtagttttagtttttcgggtttaagcgatttttttgttttagttattcgagtagttgggattataggtacgtattattatgttaggttaatttttgtatttttagtagagacggggttttattatgttgattaagttggtttcgaatttttaatattaggtgatttattcgtttcggttttttaaaagtgttaggtttataggagtgagttatcgcgtttagtttaatgtgtgttgttttaaattatttaagtttgtagtaatttgttatatagtttaaatattttttaattttttagaaattttaacgtaattttagattagaaaagtggtaagaattatatagaatgttatatttttttatttagattttttaaatattaattttttttgtttttattattagaaatttattgttattttaaatgttaagtttttattatatttgttttttttttgtttttttatatatatatatatatatatatatatatatatacgtgtgtaggtgtgtatgaatttgttatttagtttatttggtttttttaatttgttattttgttttgttttgtttttttttgagatagaatttttttttgttatttacgttggagtgtagtggtgtgattttagtttattgtaattttttttttacgttggagtgtagtggtgtgatttcggtttattgtaatttttttttttcgggtttaagcgatttttttgttttagttttttaagtagttgggattacgggtgtttgttattatatttggttattttttgtatttttttttaagtagagacggggttttattatgttggataggttggtttcgaattcgtggttttaggtgatttatttgtttcggttttttaaagtgttgggattataggggtaagttattgtagttagtttattttttagttttaatatttattgatgattttgtttgaattgatttttattaaaatggttgttgagttgtggtttatatttgtaattttagtattttgggaggttgaggcgggcgtattacgaggttaagagattgagattattttggttaatatggtgaaatttcgtttttattaaaaatataaaaattagttgggtatggtggtgcgtgtttgtaattttagttattcgggagattgaggtaggagaattatttgaattaaggattcggaggttgtagtgagttgagattgtgttattgtattttagtttggcgatagagtaagatttcgttttaaaaaaaaaaaaaagtaaataaataagtaaaataaaataaaataaaatggttgttgaatagtggtttttttaagtttattatttttttatgtattatttggtattttattattagagtttttttttttttttatttatttatttatttagttatattaatgtgagtcgtaggttttattttaaaatgaaaaagttatatttgattattgaaagtgtacgaatggttaagtggggtggtttatatttgtaattttagtattttgggaggttaaggtgggaggattatttgaggttcggagtttgagattagtttggttaatatagtaaaatttcgtttttagtttttattaaaaatataaaaattggttagcgtaatggtttacgtttgtaattttagtattttgggaggttaaggcgggtggatcgtttgaggttaggagttcgagattattttagttaatatggtgaaatttcgtttttattaaaaatataaaaaaaaaagaaagaaagaaagaaagaaagaaaaaatatagttggttgtggtggtaggtatttgtaattttagttattcgggaggttggagtaggagaatcgtttgaatttgggaggtggaggttgtagtgagttgagatcgcgttattatattttagtttgggtaataagagcgaaattttattttaaaaaaaaaaaaaaagaaaaaaagaaaaaagaaaaatatattttttcggtttttattattttttagtttttgttttatttttgtgtttgtttatatgagaggaggtattgtaggagtagagtttttaggagggtttggtttattatattgtattgggaaggagtttagagttagagatgtaggaatgttggcgttttgtggataaggtggaagagtttttttttaattatttttgtttttttaaaggaataggtttgatagttggttagtagtaagtggatagcgaggtcgagttgatggagggttttgttgttgttatttttgtttagagtataatacgtatgtagaaagtgtatatgttatgagtggatagaggataaatcgttattttattggggggcgagtagaggggagaggtttgggtttgtattattttttggtggtcggaaggttgggtttttagaattggaggagattggaggaggaggaggaggaagaggaagggaaggaggaggaagaggaagggaaggaggaggaagaggaagggaaggaggagaggtgggtagtattgagggtttttgcgaatttttatttataagttttttaggtttttggtagtacggttgtgtttttttttggttgcggtgagtggttcgcgtggtagggtaggggaagagcgttggagatggtcgtgtgtgtttacgagattttttttttttgtttaagttacggtagtggcggaaatttatttattttttggatttgggttgagtcgtggtttgttttattttttgggatatatagtagaagggagtgtgtttgtttgtagttgagattttagggatagcggttttgattttaatttgtagttcggggtttagttttgtagagttcggtaggggaagaataaaatgttttttgttgggagttatcgggattggggttgtttgtaggttgggttacgtgtgagagtgaagttttgtttgagtgtgttggtgggagacggtatagacgggaggttgagttgcgtttgtttgtagggatttgcgttgggtggggcgggaaggatgggtagtaggcggtagggatagtgaaaagttggtgggtttatggataggtagcgttattggagagaaagaattgtcgatggagagttttagaataaggagttggagtattcgaggggttgaagggttggtattatagtaataatgttttttgggtatgagaggaggggaggatttgtgtaggtcggtggttaagatcgttttgaggggagggtttttgagtttaggcgtttaggaggagtttggatttttaattttttttagtggtgttttgggatttggggtatgtaagttttatatttttttggttatatttattttttttgatttgaggggcgagtttgttggtttaggaatgtaggcggttcgtgttttaggttggttgtacgttttttagtaacgttgtgttatttttcgagagtaacgtgtgtatttatttatttttacgttatttttttattttgtatttgggtaagtagagtttttgtttttcgttttgcgtgtttgttttatttttatatttttatattttatttttagttattaatattgtatttttttttttttttttttttttttttttttttttttttgagatggagttttattttattatttaggttagagtgttgtggtgtgatattggtttattgtaattttcgtttttcgggtttaagcgatttttttgttttagtttttcgagtagttgggattataagtatgcgttattacgtttagttaattttgtattttttaatggagatagggtttttttatgttggttaggtttgtttcgaatttttaattttaggtgatttattcgttttagttttttaaagtgttgggattataggcgtgagttatcgtatttagtttgtattttttatttttttagagatagggtttcgttttgtttttt

SEQ ID NO: 2063 - DNA, 5407 bp, Artificial Sequence
  chemically treated genomic DNA (Homo sapiens)
gagtgaggttttatgggtatgggattttttgagttaggcgtaggatgtaattttttggtgtgtcgtttgttaagtattggaaaagtttagtattagggcgggagtgattcgattttttaggtgttatttgttatagttttttttggtttgaaaagggaattttttgattttttgtatttttttggtgaggtgatgttttattttgtttcgttttatgtttggtgggttatatttattgttttgtatttattgtttgataagttttagtgagatgaatcgggtattatagttggaaacgtagaaattatttttttttgcgttatttacgttgggagttatagattggagttgtttttttttagttattttggaattatttaattttttaaaaaattttatttgggttaggtgcggtggtttacgtttgtaattttagtattttgggaggttaatataggtggattatttgaggttaggagtttgagattagtttatttaatatagtgaaatttcgtttttattaaaaatataaaaaaaatagttatatatggtagtagatgtttgtaatgttagttatttgggaggttgaggtaggagatttgtttgaatttaggaggtggaggtcgtagtgagttgatatcgtattattgtattttagtttgagtgatagagtaagattttgtttaaaaaaaaaaagtagttattaataattttatttattattttattggaggttataggttagggaaaatgggtaaaaaatataataaaaggtataataattgaaaaaaatttaatgaaatttttatatttagagatattattagaaaatttaaaaggatttatagataaaatattaaatgtaataagttaatttaatatggatattggtagtaaggttaaaatatttttttatttataatatatagtagatttttttttaatttatggttttgttttttatagttttagttatttatggttaatggtagtttgaaaatattaaatgggtaattttagaaataaataatttataagtttttaattgtgtattattttaagtagtatgatgaaattttaggttagtttattttatttggataaggatgtaaattattttttaattattatatttttattgtatatgttatttaatttttagttatttagtagttggtttagttattagattagttgttttggtttttagtgtttgtgtttaagtaatttttattttatttaataatagttttaaagtatagaagtagtgatgtttgtaatttaaatatgttaaagagaagttattaagtgttttttttaaatgaaaaggtgttaagtttttgatttaataaggaaagaaataaaatatgttgatgttgttatgttttatagtaaaaaggaattttttttttataaaattgtgatggggaaaagggaattgtataaattttattattatattttaaattgtaaaggttatgattagagtgtgtggtaagtgtttagttaagattttaaaaagttattaaatttgtgggtggaggatatgaatagaaaggggttttaattggtagtaattaggtttagtattatttgtggttttgggtatttattagaagttttggaatgtattttttgtaatttagaagggattatttatcggttattttgtattttttgatttatatttttttatttttttttattattatttgttttttgtttttggtaattattgttttattttttatttttgtgtatttaatttttttaagattttatatataagtgagattatgtaattaatatttgagaaaatttgtgttttgatgagtttattagaagtgtatatggtttttaggtttataggagagtatgagttagaagtattaattaaagtttcgatttagaagtgtgtatatgttgattttttaatttgaaataaatattgggattagggataatttttttttagaagataggttttatatgttaagtaataatggtattaatgtagagtggaaatataaattatgttatagagttggataagtatagttatagtgtagtatggaaatgtgtgatattgttatgtggatattgtggatattgttatgtttatttttgtatttttgaaatagaaaggaaatatgaaatattggatatgatatgtgagaaagaatgtaatttgaaaatttggttaatttttagattttttaaattattttaattgttttattttttagggaaaagatagtgtataaagtaaattttttttttaaatatgatatttgaagaattataaaatttttattttgtttggcgatttttttaattaaatttaaatttatagttatttttttgtaaatgttgttagaaataaaacggagttattaaggaaaaaaaaaaaaaattggtagagttagggaagattatgtagagagggtttttatatttgtatatttaataagaataattattacgaaagattttgtaaaaattataattttgaaaaggttattataattttatatgaaaaatgttttaaagatatttgttttgttagtaattgtttgtttaatttttgattggtgttatcgttgttattgatatttgtaggtaaggataattattttaaaataaatatgtaatttttttaattttttttttttaaaaaatttgtttttttttatttttttgagtatgtatatcgtttattattgtatatatatttttattgtaatgttttatttttaaataaatattttttttttttagagagtttttttttttgtttgttatttaggtagatattttgtatatatttggtaaaaatttatacgttgttgaaattgaaattaagatttttttttttattttttattttttaggtataatttaatttttaatttagtttttggtaatattaatatttttttttggtaatataattttgattggattattgtttttatgttttaggtttaatttgtttaaaaatttgatgagtggtcgggcgtggtggattatgtttgtaattttggtattttgggaggttgaggtgggtagattataaggttaggagattaagattattttggttaatatggtgaaatatagtttttattaaaaatataaatattagttgggtatagtggtatatgtttatagttttagttatttaggaggttgaggtaggagaattatttgaatttaagaggtagaggttgtagtgagtcgagattatgttattgtattttagtttgggtaatagagtaagattttgttttaagaaaaaaaaaagtttgatgagtgtggggttagtgttgtgatagttttttgtgttttgttaatttttttggattattttttaaaatgaggaatattttagatttagtttgtagtaatttaattttgggagttttgtaagaatttatttattttaatggaaaatagtttaggttgtttattagttttttttgagttttgttttgggtgttttatttaaaataaaaaacgtataaatataaaaatagtaatgtttatgtttgtgatagttaatgttaagtttttgttgttgtttatggttgttatttaaaaagtagatttaattttgttatgtattggagtttgggaatgttgttaagagatatatatattgaaatttggagagttgttttgtatttattaattaggtagtaataattttggatgaaggttagttttattaatgttgtgaattagttttattaatgttgtgaattagtagtgtttttaggaatagagaatattatattatttattttgtatttttttatttatataatagaattagttagtgataattttttttattcggaatcgattgttgttatatttttgtatgatatatagatttttgtaaatatgtgattttttttttaaatggagaaaatttaaaaattttttttaaaattttttatgggtatataagaagataggaggtgatattttaaaataagtatttttgaattttttgtataaaaaaaagtaatttttttgttttattattaatattatatgtggtgatatgaatgtttaaatgtagatagtagttatgagatattataagagaagaaaaaagttttgtcgtttatggtaatttatttaaaaagttatttttgatttaggttggaggtgtatatagtatagtttttagagttttgtttatgttatgaatatttgttatttaaaattttataggttaagagtttttgaagagaaggttatatgttagtagtaattgttatttttttttttaaatattgttatagtataattttgtttgaattataaattttagtttttattatatttgattttggtattttggtttgtagtgttatagtataggaaatgttttaaatgttttgtttttatgtaagtgaatatcggtatatatatatatatatatatatatagatatagatatatatatatatatatttatagttagtttagaatgtggggtaaggaatattagataaagagggtaatataagaaagagaagatattgaaaatattgggaagaggtagtaatagagtgttagagaagataaggtagttgggagggggagaaattaagtgaggtggataaattaaaagtatttttttgggttaaagtagattaaaagtttagtaattgtttaatattattattttattttatagatgtgggaataaaggttaaggaaggagaaatgaaaatgtagaattatatgggggtttttttaaggaggtatgaaggaaggtgaggatagggagagcggttggaagttagggggtaagagaaattttaaaaattagggtttgagggaaataaaaggtgaggtaagaggtttagggttgtgggaggtatatttttttttgaaaagtagtttggatgaggaagagatttggtagttggaagagagaagaagttattatagggtattgaggaaaagttttgttgaaattggagattaaatattagttttgttagtaagaagttgtattttttagtgaaatgttgttgttgttattttaattgttagttgtttttttttttggtggtaatagtgaatatggtaagagttattttggtagtttttagtattggtgtaggggtttggattttaaaaagtaagtagggtttttttaggtgtaattggatattaagggtttgggtttttttgtttttcgttttttttaattattttggtggttgggattagaatttgaagttttaaggtagttaaatgtgttagattttttgtgttttttagattttaggtttttgttttttaaattatttttatttttattttttttaattgttttttgtttttttttttatttttattattttgtttttttattttttatagt

SEQ ID NO: 2064 - DNA, 5407 bp, Artificial Sequence
  chemically treated genomic DNA (Homo sapiens)
gttgtgaagagtggaaaagtaagatggtgaagataaagagagaagtaggagataattaggaagaatgggaatgaaaatgatttagaaaataagaatttagagtttaaagaatataggaagtttgatatatttgattgttttaaggttttaggttttagttttaattattagaatggttgaagagggcgggagatagaaagatttagatttttagtgtttaattgtatttaggaaagttttgtttgttttttaaaatttaaatttttgtattagtgttgggagttgttagagtgatttttattatgtttattgttattattaggaaagagaatagttaatagttgaaatggtagtagtagtattttattgggagatgtaattttttattggtagagttggtatttgatttttaattttagtaaagtttttttttagtattttgtagtgatttttttttttttttaattgttaaattttttttttatttaaattgttttttagagaaaaatgtgttttttatagttttgagttttttattttattttttattttttttaagttttgatttttagagttttttttattttttgatttttagtcgttttttttgtttttatttttttttatatttttttggaaaagtttttatatgattttgtatttttatttttttttttttagtttttatttttatatttataggataagatggtgatattaagtaattgttaagtttttagtttgttttaatttagaaggatgtttttagtttatttattttatttagttttttttttttttagttgttttattttttttggtattttgttattgtttttttttaatgtttttaatgtttttttttttttatattgttttttttgtttggtgttttttattttatattttaaattggttgtgagtgtgtgtgtgtgtgtgtttgtgtttgtgtgtgtatgtgtatgtgtgtgtatcgatatttatttatataaaggtaaagtatttaaaatattttttgtattatagtattataaattaaaatgttagaattaaatataataaagattgaagtttataatttaaataaaattatattatagtaatatttgagggaaaaaatgataattgttgttagtatgtgattttttttttaggagtttttggtttatggagttttgagtaataaatatttatgatataaatagaattttaggagttatgttatgtgtatttttagtttaagttaaagataattttttgggtaagttgttataagcggtagagtttttttttttttttgtaatattttataattgttgtttatatttgggtatttatattattatatgtggtattaataatagagtaaagaggttgtttttttttatataaaaagtttagagatatttgttttaagatgttattttttatttttttgtatgtttatgaaaaattttaagaagaatttttggattttttttatttaggaaaaaaattatatatttgtagagatttatgtattatgtagaaatgtggtagtaatcgatttcgagtaaagagggttattattaattaattttattatgtggataagaaaatgtaaagtgagtagtgtagtgttttttatttttggggatattattggtttataatattaataagattggtttataatattaataagattagtttttatttaagattattattgtttaattgataaatatagagtagttttttaaattttaatgtatgtattttttaataatatttttagattttaatatatgatagaattgaatttattttttggataatagttatagataatagtagagatttaatattggttgttatagatatgaatattattatttttgtgtttatacgttttttattttgggtagaatatttaaaatagagtttaggaaaagttggtagataatttgggttattttttattaaaataagtgagtttttgtaagatttttaaagttgaattgttataaattaaatttgaaatgttttttattttaaaaaataatttaaaagagttggtagggtataggagattattataatattagttttatatttattaaattttttttttttttgagatagagttttgttttgttgtttaggttggagtgtagtggtatgatttcggtttattgtagtttttgttttttgggtttaagtgatttttttgttttagttttttaagtagttggaattgtaggtatgtgttattatgtttagttaatgtttgtatttttagtagagattgtgttttattatgttggttaggatggttttgattttttgattttgtgatttgtttattttagttttttaaagtgttaggattataggtatgatttattacgttcggttatttattaaatttttaaataagttaggtttaaaatatgagaatagtaatttagttaaaattatgttattagaaaggaatattagtattgttaaagattgagttagaaattgagttgtgtttgagagatggaagatagaggaagaggttttggttttagttttaatagcgtgtaagtttttgttaaatatgtgtagaatgtttatttaaataataaatagaaaaagaggttttttaaaagaaaaagatatttatttgagaatagagtattgtaatgggaatatatatgtaatagtaaacgatgtgtatatttagggaggtaaaggaaggtaaattttttaaagaaaaaaaattaagagaattatatatttgttttgaaataattatttttgtttataaatattaataataacggtgatattagttagaggttaaatagatagttgttggtagggtagatgtttttgaggtattttttatgtaaggttgtgatggtttttttaaggttgtggtttttgtagagtttttcgtggtagttgtttttattaggtatataagtgtgagaattttttttgtatagttttttttagttttgttagttttttttttttttttttagtgatttcgttttgtttttggtaatatttgtaagaagatgattgtaaatttaaatttagttaggaaaatcgttagataaaatgaaaattttgtaattttttaaatgttatatttgagggaaaaatttattttatatattgttttttttttgaaaagtggagtaattgagatagtttgaaaggtttagaaattaattaggtttttaagttatatttttttttatatattatatttagtattttatattttttttttgttttaaaagtatagaaatggatatggtagtgtttatagtgtttatatagtaatgttatatatttttatattatattgtgattatgtttgtttagttttatggtatggtttgtatttttattttgtattagtattattgttgtttgatatatgaaatttgttttttagggaaagattatttttagttttaatatttgttttaaattaaaaaattaatatgtgtatatttttaaatcgaagttttaattgatgtttttaatttatatttttttatgggtttaaagattatgtatatttttgataagtttattaagatataggtttttttagatattgattgtataattttatttatatgtggaattttaaaagagttgagtatatagaaatagagaataaaatagtgattattaggggtaggaagtaggtggtggtgggaggaaatgaggagatgtaggttaaagaatataaagtagtcgatgagtagttttttttgaattgtagaggatatattttaagatttttggtggatgtttaaaattataaatagtgttgaatttgattgttgttaattggagtttttttttgtttatgttttttatttataaatttgatggttttttaagattttaattaagtatttattatatattttgattataatttttgtaatttgaggtgtgatggtaaaatttgtataatttttttttttttattataattttatggaaagaagatttttttttattgtagaatatagtaatattagtatattttgtttttttttttattaagttaaaaatttaatatttttttatttaaaggaagtatttaatggtttttttttggtatatttgaattataagtattattatttttgtgttttggggttgttattaagtaaaataagggttatttgaatataagtattggagattaggatagttgatttgataattgagttagttattaagtgattaagggttgggtagtatatatagtggagatatgataattaaggggtgatttgtatttttgtttagatgaagtaggttggtttgaaattttattatattatttagaatggtgtataattgaaaatttatagattatttatttttggaattgtttatttaatatttttagattgttattgattatgggtaattaaaattgtggaaaataaaattatgaattaaggaggggtttattgtatattataaataaaaaaatattttgattttgttattagtatttatgttaaattaatttattatatttaatattttatttatagatttttttggattttttaatgatatttttaaatatgaaagttttattagattttttttaattgttatattttttattatattttttgtttattttttttggtttatgatttttagtaaaatgataaatagaattattgatagttattttttttttttaaatagagttttgttttgttatttaggttggagtgtaatggtgcgatgttagtttattgcgatttttattttttgggtttaagtaagttttttgttttagttttttaagtagttgatattataggtatttgttattatgtgtggttattttttttgtatttttagtagagacggggttttattatgttggataagttggttttaaatttttgattttaggtgatttatttgtgttggttttttaaagtgttgggattataggcgtgagttatcgtatttggtttagataagattttttaagaggttaggtggttttaagatggttgaagaggaatagttttagtttatagtttttagcgtgagtgacgtagaagagggtgatttttgcgtttttaattgtggtattcggtttattttattggggtttgttagatagtgggtgtaggatagtgggtgtagtttattaagtatgagacgaaatagggtgaggtattattttattagggaagtgtaaggggttagggaattttttttttaagttaagggaagttgtgatagatggtatttggaaaatcgggttattttcgttttaatattgagtttttttaatatttagtaaacggtatattaggagattatattttgcgtttggtttagagggttttatgtttatggagttttattt

SEQ ID NO: 2065 - DNA, 2880 bp, Artificial Sequence
  chemically treated genomic DNA (Homo sapiens)
gattagtttttgtattttgagagtagattatttggtttttttttgttttttattagcgaagttggatatattttttttatatttttttaattatatgttatatattggtttttttttttttttttagtttttaaatatattaagatgtttgtattggatgaagttgacgaaatgttaagtcgtggatttaaggattagatttatgatatattttaaaagtttaatagtaatatttaggtgagggtagttttgtttgaatagttaatgatttttgaaaaatagtaagtgttaggggaattatatattggatttttgagtttttttatgtatttgttttagttttaggtgtggttagggaagggagtaggttttaggaaggaattagtattttaagattggtttttttttttattaggtagttttgttgttagttataatgttttttgatgtgtttgaggtgattaagaagtttatgagggattttattcggatttttgttaagaaggaagagttgattttggagggtattcgttagttttatattaacgtggaacgagaggtggggtttagtgtaggaggcgggtttggtagtgagttgttgggtatagtttttgattgatttttgttttttaatttttaggagtggaagttggatatattatgtgatttgtatgaaattttgattattatttaggtagttatttttattaatattcggaggaaggtggattggtttatcgagaagatgtatgttcgagattttattgtattcgttatggtgtgtttgttcgttgttagtttgttgtgggtttgttcgttagaagtgttttatttgaagttagggtttttggaatttaggtgtttatttggtttgttgtatatttgtttttttttttagtatggagatatggattaaaaggaacgagacgtgattatgagggagtttcgttttggttttagtagagttttgattattattgatttgttggtgagtagagggaattgatagtaaaggtagaagggaggatttaaggtgattttttttttaaggggatattagtgttttttaggaaagtagtagtttggaatagaatttggtatgtttaaggtttttggggaattgggatgtttattttttttgttttttttggttgtttatatggatgtttaagtgtttttttttcgggatagagtgtttttcgtgtatatgttgaagagttgttttttttgacgtaggttagaggtattgatgtgtagtaggtttttttagttattaattatgatttttttattaatagggaaaattatatttataggtaagcgtagatttggaatatttttttatttttttatatttggttttttttgggtttaaagtttttgatattttttatttttttttttgttttttagaatcggtcgaggtggacggtttggtcgtaaaggtgtggttattaatatggtgatagaagaagataagaggatttttcgagatattgagattttttataatatttttattgaggaaatgttttttaatgttgttgattttatttgaggggttgttttgttatttagttttagttagggtttaatttttgggggttgaggagtagtaggaggggggagggaagggagttaagggatggatattttgttattttttttttttgaataaatgttattttttgaggtaaaagaaggaatcgtgaatattttagatatttttttttttggggtaggtttttgttttaggcgtcggttttttttttaaaaaaaaaaaaaaaatattaatttatttttttaatttagtaatttttagattttagaggttttttttattttagttgagtttttttgaaagtgatttaagggattatgttatttagttttatttgttggattaaatttggagggagaatttttaaaatttttaagtgaggttgtttagggggttgtttttaggtggggggaagtaggggagagaaaatggtagttatttttatattgttttgtatagtatttattgatttaggaaataaataaaattttgaataaaatgatttggaaattgtttgtttgggttttttattttttattttttttttttttttttatttgttattgggtgtatttttgttttttttttttttagtagatggttatttttgggttgttgtttttttgttattatttgagtttttagacgttggaaagttatgttttcggttttgtgaatgataatgttgattggagtgttgtttttttgtaaagggttgggtgtggatggttataagttttttatatgttttagttaagaggaagtagtataggggttagtttagaggtttaggggaaaggagtggaaatcgatttttttattaagggaggggtttgtattttagttgtttttatagttatttgttataattgttaagtaagtttcgttgagtttgatatatggatttttgtggattaattgttttaggatttcgtttgtatttatgtgatattgttgattttgttttgatgaagtagggttaatagttttttaatttaattataaaaattaatgattaagagagaggtggttagagttgaggtttttgagttaggttgtgggtgggattatttttagtataggaagtgagatttttatttttttttttttaagagagggttgagggagtagggttgagtaattggtgtagatagtttagttggattttgggtgaggcggtttagttatgaggttggttgtgtttttttcgggggttttgttggggttattggtaggtaaggaggaaggaggttgaggggagggggtttttgggagggagtttgttttgggttgttaattattttttttttgttaaaagt

SEQ ID NO: 2066 - DNA, 2880 bp, Artificial Sequence
  chemically treated genomic DNA (Homo sapiens)
gtttttggtagagaggagatggttagtaatttagggtaggtttttttttaggggttttttttttttagttttttttttttttatttgttagtagttttagtagggttttcgagaaaagtatagttagttttatggttgaatcgttttatttaaagtttagttaggttgtttgtattagttgtttaattttgtttttttagtttttttttggaaaggaggaaatgaaagttttattttttgtattggagatgattttatttatagtttgatttaggggttttagttttagttattttttttttagttattagtttttgtaattaagttaggggattgttggttttgttttattagggtaaagttaatagtgttatatgggtgtaaacggagttttagggtagttgatttatagggatttatgtgttaaatttagcgaaatttgtttggtagttgtggtaagtagttatgggaatagttgaggtataggttttttttttggtggggaaatcggtttttattttttttttttggatttttgggttgatttttgtattatttttttttggttgaggtatgtgaggggtttgtgattatttatatttagttttttatagaggggtagtattttagttagtattgttatttatagagtcgagaatatggttttttagcgtttgagaatttagatggtgataagaaagtaatagtttaaaggtaattatttgttggggaaggggggagtagagatgtatttagtagtaggtgggagagggaaggggaggtaagaaatgagaagtttaaataggtagtttttaagttattttatttagaattttgtttgttttttgaattaataaatattatataaaataatgtaaaaatggttattatttttttttttttgtttttttttatttggggataattttttgggtaattttatttaggggttttaggggttttttttttagatttggtttagtaaatgaggttgagtgatatagttttttgaattatttttaaaggagtttagttgaggtgaggagagtttttgggatttggaggttattaggttagggaaatggattagtgttttttttttttttttgggagaagagtcggcgtttggggtaagagtttattttaaagaaaagggtgtttaaaatgtttacggtttttttttttgttttaaaaagtgatatttatttaaagaaaaaaaatgataagatgtttattttttggtttttttttttttttttttttgttgttttttagtttttagagattgagttttggttggggttgggtggtaggatagttttttagatgaggttagtaatattgaggggtatttttttaatggaggtgttgtagaaggttttaatgtttcgaagagtttttttgtttttttttgttattatgttaatagttatatttttacggttaaatcgtttatttcgatcgattttggaaaataaggaaggggatgaggaatattaggagttttaagtttagggagggttaggtgtgaaggggtaggggagtgttttagatttacgtttatttgtggatatagttttttttgttggtgggaaggttatagttgatgattaaagaaatttgttgtatattaatgtttttggtttacgttaagaaagataattttttagtatgtgtacggaggatattttatttcggagggaagatatttaggtatttatgtgggtagttaaggaaggtagaggaaataagtattttagttttttaaaggttttaggtatgttagattttattttaagttgttatttttttgagaggtattgatgtttttttggagagggaattattttggatttttttttttgtttttgttattagttttttttatttattagtaggttagtggtaattaaaattttgttagagttagaacgaaatttttttataattacgtttcgttttttttggtttatatttttatgttggaagagaaaataaatatgtagtagattaggtaggtatttgggttttaggaattttggttttaagtaggatatttttgacgggtagatttataataggttggtagcgggtaaatatattatggcggatatagtgaaatttcgagtatgtattttttcggtgagttagtttattttttttcgggtgttgatgaagatgattgtttgggtgatggttagggttttatataagttatatagtgtgtttagtttttatttttggaggttgggggataaaaattagttaggggttatatttaataatttattattaggttcgttttttgtattgggttttatttttcgttttacgttgatgtagaattggcggatattttttagggttaattttttttttttgataagaattcgaatggggttttttatgaattttttggttattttaagtatattagaaggtattgtggttgatagtaaaattatttagtggaaaaaaaggttagttttagagtgttggtttttttttgaggtttgtttttttttttagttatatttaaaattgaagtagatgtataaaaaggtttaagaatttagtatatggtttttttggtatttattattttttaagaattattagttatttaagtaagattgtttttatttgggtgttgttgttgagtttttggaatatgttatagatttggtttttgaatttacggtttaatatttcgttagttttatttagtataaatattttgatgtatttgggggttagagaagaaaaaaaaagttaatatatagtatatgattagggaaatgtgggagagatatatttaatttcgttgataaaaaatagagaggagttaagtagtttgtttttagagtataaagattgatt

SEQ ID NO: 2067 - DNA, 5986 bp, Artificial Sequence
  chemically treated genomic DNA (Homo sapiens)
ttagtttttgtgtatatggtatatattttttataggtaaggattttgataaatatttttttattttttatattgttgagaataatgttttggataatattttatatatggtattgattattgtttaaaattttttaatgttttaatggttttttatatcgttaggttaataataaaagttttatttatgtttatttggttttatttgatttgatgcgttttttttttttttttttttttttaagatagagttttattttgtttttttcgggttggagtgtagtggtacgattttggtttattataattttcgttttttaggtttaagtaatttttttgttttagtttttcgattagttgggattataggcgtgtgttattatgtttagttaatttttgtattattagtagagatagggttttattatgttggttaggttggttttgaatttttgattttaagtgatttatttattttggttttttaaagtgttaggattataggcgtgagtatcgtgtttagttttgatgtttttgttattattttttatttgtttcgttttatttattatgggtttttttgttgttttttgaatatattaggtaagattttattttagagatattttatttgttttttttttagatagttgtatggttgtttttttatgtttttagggttttttttaaaggttattttttttgtgtgtgtgagatggagttttattttgttttttaggttggtgtgtagtggtaagattttggtttattgtaattttcgttttttgtgtttaagttattattttgttttagttttttgagtagttgggattataggtttgtattattatgtttagttaatgtttgtatttgtagtagagatgagttttattatgttggttaggttggttttgaatttttgatattaagtgatttatttgtttttgttttttaaagtgttgggattataggtgtgagttattgtatttggttttaaaggttattttttttatgaggttttttttgattatttatttatattgtgatttttgaaatattttttttttttttttcgtttattgtttttttatagtattttttatttttttatatagtatgtattttttttatgtgttgtgtttattttttgtttttttttttttttttggaatgttagtattattttagtttaaatttgtttgtttatttttgtgtttttagagtttaaggataatgtttggtatagaggaggtatttaataaatatttgttgaaagaaagaaggaataagtaaattaatagaaggtgtttcgtaaatatttgtgaaattgaattaaaagtgttagaaggagatgattgtgaaatttttaaagtttaaaaatatgtgagtttagaagaatggtggagttgagtgttgttttattataaatattttcgaggaaggattgaaattgtgtgtttgcggtgggaggggtagttgggtaaggaatcgtgaattttcgtagaaatatttggggttgtagaatttgggtgagagcgttgtatttgggagttggcgacgttggcggtttgtttatttattttatttgaatatttgtttatgatataggtgtttttttttaagttattttggtttttgtttttttttttaggttgtgaagattatagaaatttgggatggtttatgggacgttttttagttttaagtaggaaaatagtagtgaaaatggtaattaaaatattacgtaggattgggggttttggggaaatagtttattttagagtagtgtagtgtagagtttttcgttttttattagggtttatttttaatattgtttatttgaaaattttttttttggtttattcgtttgtagttgtttattttgtagaaggatggcgttttgatttttacgttttttgtttttttagggattttatagtatttttttttacgcgtcgtcgttattatagtagacgtttgcgtttttattatttgttgtatagattttcggtgttttgattgtaaataaaatattttagattattgtgaggtcgatgtaagtatagtttttttgttggtagttagattttttaaggtggtgtgattgtgatttgtttatttttcgagattaataataataaagcgataaaatggtgtttttatatattagttgaaagatttagtatgtgaaggggatcgaagtgtttattttttatttttatataagatatgaattttatgagtaaaattaaatttttgtggtaaggtgaattattttagaatgtttttatttatatatatgtggtagtttgggtgtttatgtatatggatagatgtatatatatagagtttttgtgttgtttagtaattgttttaaaatttggataattatttaatttttagggtaaggtataaattatggtagggaggtttattttaatttttttgtttttttttttttagtttgtagtttaataaattgatagttttaaaagtagaaaaattaaagaggatgagattttttgtttgattttaggtgaatttttttttgttagttaggtaggaagttttgatttgaaaattagttttgggtattgttttttttattgttttttgggtattaatttttgttttttaattttagttgaattagtggatggtgatattataggtttaagatagttgtatttaaatattagtgattataggttatattaaggaaatatttgtaggtaatttagggtttgggaaggagttatttttagttatttgtaagatagtaggatttgtagattatagtataattaaatttagataaaattttgaattagtgagaattattaggaaggaaaggaatagaaaatgaattaatttgagtgttaggagatttgtatttagttttgatttcggtattaatcgaatgtatgtttttggataggaaatttttttgagtttcgatttttttcgtggtaaaaaggagagggttaaattatagggtttcgagggttttttttagttgttatattttggagcgtatgagatgaggtaggtatataaagtggataagatgtggttaagaaaataagttatatattaagtttatttgtagtataggtgtttaagaaaattttgttgttgtgtaatattagaacggaaggttggtttttagtaaaatgtattaattttggtttaaattaagatgatgggtatcgggtatgggggtggggaggtagttgaagatttattgagttttgttttagggtagttttgtttatcgttttattttattttttattacggtgtttaagtttatattgagagagaaatttttagttgtaaaagggagaagagaaacgttggaatattagtatcggacgttaggatatggttgtggtgttttaaaaattattttattatttggagtttgatttcgaggggagtatttttattttttagttttttgaaagtatttattagtatttgaatattgttttgagtttgttggagtagtgaaatttggtgagagagaagggtggaggaaggaaggagttgttgtatttggcggttggatttaggtagaggaaattgttataatttcgggaaagaatagaaaagtagaaagggacgagtttttatacgtagttaatgtttatggttttaattgtgtttgggaaggaagattttgggttaggggtgtattttcgttttttaaaattaaacgtgtttgagatagttataaagtttattaagggatttgagagattagagttttttgttttttttttttaattttgagttttttttttatttttattgagggagagtttgagtttatgataagtgtcgcgtttatttttggttaatttttaaaagaaagacgttcgttttggttttttttttaggtttttagtttttttagggatggtagaaatttttgggttaaggttgagcgaattattgtttattgtttttattagtttttagtaaaggtacgtcggcgggggggcgtttagtttttttagtaaacgtttcgcggtttttttcgtagattacgaggtgggggtcgttggggagggtcgagttgggggtagttcgttatttcggtttttagcgagttgtcggcgattttcgcggttttttggtttaggtttcggtttttcgggcgaggagcgggagggaggtcggggtttaggcgtcgcggcgaattcgttaacgtagcgtcgggtttcgaattttaggtttcgttttaggttttcggtcgtttggttagtttgtttgttttaattttaattttttcgaggttagttagagtaggtttgttggtagtagtatttttttagtagttacgcgattagttaatttttcggcggcgttcggggaggcggcgcgttcgggaacgaggggaggtggcggaatcgcgtcggggttattttaaggtcgcgttcgttagtttcggcggggcggttttcgtcgtcgtaattaatggatttttttttttgtttaaatagattcgtcgtgttaattattttttttttcgttagttttttttttatcgttatattgggttattaaaaaaagggggttcgttttttcggggtgttttttttttttttttttgttttcgtttgtttacggttttgcgatttcgacgtcggtaaggtttggagagcggttgggttcgcgggattcgcgggtttgtattcgtttagattcggacgggttttgttatttttttcgtttgtttggttttttttttttttcgttttttcgttcgttagtttatttgattagcggagattcggcggtcgggtcggggttttttcgtagtttttgcgcgtttttagagttcgggtcgtggttcgtcggggtttgtgttttttggtttcgagggtagtcgttgggttttcgagaggggttcgggttgcgtaggggcgttttgttttgttcggttttgtttttttgagagtgcgagagaggcggtcgtgtagattcgggagaaagatgttaaacgtgcgagtgtttaacgggagttttagtttggagcggatggacgttaggtaggcggagtattttaagttttcggtttgtaggaattttttcggttcggtggattacgaagagttaattcgggatttggagaagtattgtagagatatggaagaggcgagttagcgtaagtggaatttcgatttttagaattataaatttttagagggtaagtacgagtggtaagaggtggagaagggtagtttgttcgagttttattatagattttcgcggttttttaaaggtgtttgtaaggtgtcggcgtaggagagttaggatgttagcgggagtcgttcggcggcgtttttaattggggtttcggttaattttgaggatacgtatttggtggatttaaagattgattcgtcggatagttagacggggttagcggagtaatgcgtaggaataaggaagcgatttgtaatcgacggtaatgatttttttttaattatagaatgtgtttggggtttcgttttgtttgttggagggtgttaattttagtttgtttttcggcgtattttgatttagttttgggagagttaattttattggttttaggtgtttagtgttatttggtttattgtttgtttgtttgtgatttttaagttagaaattggagatggtaagattcgataatttttttaatttaatatatcgcggttttttttattagtaatttttaggtatgtgataaagttgggatgtttattaacggttcgttttttggttagggaaagagttttggggcggagaatgtattttttgttttttgaaaataattttattttgtgtttttaaaagttattggggatgacggatttaggattgtgggtggaggtagtgggttttttattttttgattatggggttaatttttgttagttattgttttttttaataaagattgtgtgttttttttaaaaattttttttgcgtttaga

SEQ ID NO: 2068 - DNA, 5986 bp, Artificial Sequence
  chemically treated genomic DNA (Homo sapiens)
tttaagcgtaggggaaatttttaaaaagaatatataatttttattagaaaaaataatggttggtagaagttggttttatagttaggggatgaaaaatttattatttttatttataattttggattcgttatttttagtggtttttaagggtataaaatgaggttgtttttaaaaaatagaaagtgtatttttcgttttagagttttttttttagttaggaggcggatcgttgataaatattttaattttgttatatatttaggagttgttagtgagagggatcgcgatgtattaagttagggaaattatcggattttattatttttagtttttgatttaaaagttataaatagataagtagtgggttaggtagtattgaatatttaagattaataaagttagtttttttaaagttaaattagaatacgtcgaaaagtaagttaaggttaatattttttagtaggtaaagcggggttttaaatatattttatggttgggaaagggttattatcgtcggttgtaggtcgtttttttatttttgcgtattgtttcgttaatttcgtttggttgttcgacggattagtttttgggtttattaaatgcgtgtttttagagttagtcggagttttaattaaaggcgtcgtcgggcggttttcgttgatattttggtttttttgcgtcggtattttgtaggtatttttggggggtcgcgggggtttgtagtagaattcgggtaagttgtttttttttattttttgttattcgtatttgttttttaggggtttgtgattttgaaaatcgaaattttatttgcgttggttcgttttttttatgtttttgtagtgtttttttaagtttcgggttaatttttcgtggtttatcgggtcgaagaggtttttgtaggtcgagggtttggggtgtttcgtttgtttggcgtttattcgttttaggttagggttttcgttagatattcgtacgtttgatatttttttttcgggtttgtacgatcgtttttttcgtatttttaaaaaaataaaatcgaataaaataaagcgtttttacgtagttcgaatttttttcggaagtttagcgattgttttcggagttaaaagatatagatttcgacgagttacggttcgagttttaggagcgcgtaggggttgcggggaagtttcggttcggtcgtcgagttttcgttgattaaatggattggcgagcgggagggcggagaggagaggggattaggtaagcggagagggtggtaaagttcgttcgagtttgggcgggtgtaagttcgcgggtttcgcgaatttagtcgttttttaaattttgtcggcgtcggagtcgtagagtcgtgagtaagcggggataggggagggggagaaaaatatttcgaaaagacgagttttttttttttagtggtttaatatggcggtggaagggaggttgacgaagaagaaaatgattgatacggcgagtttatttaaatagaggaggagatttattggttgcggcggcgggagtcgtttcgtcgaggttggcgagcgcggttttaaggtggtttcggcgcggtttcgttattttttttcgttttcgagcgcgtcgttttttcgagcgtcgtcgggagattggttggtcgcgtgattgttggaggggtattgttgttaataaatttgttttggttggtttcggagaaattaaaattaagataaataaattagttaaacggtcgggaatttggggcggggtttgaggttcggggttcggcgttgcgttggcgggttcgtcgcggcgtttaagtttcgatttttttttcgtttttcgttcgggaagtcgggatttggattagaggatcgcgaaggtcgtcggtagttcgttaggagtcggggtggcgagttgtttttagttcggttttttttagcggtttttatttcgtggtttgcgggggaggtcgcggagcgtttgttgggggggttgggcgttttttcgtcggcgtgtttttgttgggggttggtggaggtagtgggtaatggttcgtttagttttaatttagaagtttttgttatttttggggaggttgggggtttagggaagaagttaaagcgaacgttttttttttagaaattagttaggagtagacgcggtatttattatgaatttaagtttttttttaatgaaaataagaaaggaatttaagattaaaaaaaaaaaataaaaaattttagttttttaagttttttaataaattttgtagttgttttagatacgtttagttttgaaaaacgagggtatatttttggtttaggatttttttttttaagtatagttaaggttatggatattggttgcgtgtgggaattcgtttttttttatttttttgttttttttcgggattgtagtagttttttttatttgagtttagtcgttaaatataatagtttttttttttttttattttttttttttattagattttattgttttaataaatttagaataatatttagatgttagtgaatgtttttagagggttgaagggtgaaaatatttttttcggggttaaattttagatgatgaaatgatttttaaaatattataattatgttttaacgttcgatattagtattttagcgtttttttttttttttttgtagttggaaattttttttttagtgtgggtttgagtatcgtggtggaaggtaaagtaggacgatgagtagggttgttttgagataaagtttagtggatttttaattgtttttttatttttatgttcggtatttattattttggtttgagttaaagttaatgtattttattggaaattaatttttcgttttaatattatatagtagtaaagtttttttaagtatttatgttatagatgagtttgatgtgtagtttgtttttttagttatattttgtttattttgtgtgtttattttattttatacgttttagaatgtgatagttggaagggattttcgggattttgtggtttaatttttttttttttattacggaggaaatcgagatttagagaggttttttgtttagggatatgtattcggttggtatcggagttaggattagatgtaagttttttaatatttaggttggtttattttttgttttttttttttttaatggtttttattggtttagggttttgtttgagtttgattgtgttgtagtttgtaggttttgttgttttataagtgattgaaaatggtttttttttaggttttgggttgtttgtagatgtttttttgatgtggtttgtggttattgatatttaaatgtagttgttttgagtttgtggtattattatttattagtttaattaaaattgaaggataggggttgatatttagagaatagtaaagggggtagtgtttagaattagtttttaagttaggattttttatttaattgatagaaaagaatttatttaggattaagtaagaggttttattttttttagtttttttatttttaaggttgttaatttattggattgtagattgggggaaaaggaataggaaaattagggtaggtttttttattataatttatattttattttagaaattagataattgtttaaattttaaaataattgttagataatataggaattttatatatgtgtatttatttatatgtataaatatttaaattattatatgtatgtaaatggagatattttagagtagtttattttgttatagaagtttgattttatttatggaatttatgttttatatggaagtggaaaataaatatttcgattttttttatatgttgaattttttaattaatatgtaggagtattattttgtcgttttgttgttgttgatttcgaaaagtaagtaagttatagttatattattttaagaagtttggttgttagtagaaaggttgtgtttatatcgattttataatgatttaaagtgttttgtttatagttaaggtatcggagatttgtatagtaaataatgagaacgtaggcgtttgttgtagtagcgacgacgcgtgaaaaaaaatattatggagtttttgaaggaatagggagcgtagagattagagcgttatttttttgtaaagtgggtagttgtaagcgagtaagttagggggaaaatttttagataaatagtgttaaaggtggattttggtaaaagacggaaagttttatattgtattgttttaaagtgagttgtttttttaaaatttttagttttgcgtgatgttttggttgttatttttattgttgtttttttatttagggttgagaagcgttttataagttattttagatttttgtaatttttataatttgaggagagaggtaaagattaaaataatttaagagaaaatatttgtgttatagataagtgtttagatggggtgaatgagtaagtcgttagcgtcgttagtttttagatgtagcgtttttatttaagttttgtagttttaaatgtttttgcgaaggtttacggttttttgtttagttgttttttttatcgtaagtatatagttttagttttttttcgaggatgtttataatgaggtagtatttaattttattatttttttaagtttatatatttttagattttgggaattttatagttatttttttttgatatttttaatttaattttataaatatttacggagtattttttattaatttgtttatttttttttttttttaataaatatttattgagtgttttttttatgttagatattatttttaggttttgggaatatagaagtaaataaatagatttaaattagaatgatgttgatattttaaaaaggggagaggagatagaaaatgaatatagtatatgaaagaagtatatattatgtaaggaggtgaaaaatgttatggagaaataataagcggagagggaaaaggaagtgttttaaggattataatgtgaataagtggttagggaaggttttatggagaaagtggtttttgaggttaggtgtagtggtttatatttgtaattttagtattttgggaggtagaggtaggtggattatttgatgttaggagtttaagattagtttggttaatatgatgaaatttatttttattataaatataaatattagttgggtatggtagtgtaggtttgtaattttagttatttaggaggttgaggtaggataatgatttgaatataggaggcggaggttgtagtgagttaagattttgttattgtatattagtttggaagatagagtgagattttattttatatatataaaaaaggtggtttttgagagaagttttgaagatatgagagagtagttatatagttatttggggaaagagtaaatgaagtgtttttgaggtgggattttgtttaatgtgtttaaggaatagtaggggggtttatggtggatagggcggagtaagtggggagtggtaataggagtattagggttgggtacggtgtttacgtttataattttagtattttggaaggttaaggtgggtggattatttgaggttaggagtttaagattagtttggttaatatggtgaaattttgtttttattaataatataaaaattagttggatatggtggtatacgtttgtgattttagttagtcggaaggttgaggtaggagaattgtttgaatttgggaggcggaggttatagtgagttaagatcgtgttattgtattttagttcgggagagatagagtgagattttgttttaaaaaaaaaaaaaaaaaaaaaaagcgtattagattagataggattaggtaggtataggtagggtttttattattggtttggcgatatggaaagttattggggtattaggaggttttaagtagtgattaatattatgtgtaaggtattgtttaaggtattatttttagtaatgtgggaagtgaagaaatatttgttagagtttttgtttgtggggagtatatattatgtgtataaaaattag

SEQ ID NO: 2069 - DNA, 7038 bp, Artificial Sequence
  chemically treated genomic DNA (Homo sapiens)
tttagaatttttgttttgtttttttgttgtatttttttttatagtgttgattagaatttaatataatttatattttaattattgattttgtttagtgtttgtttttttttaggagaattttagttttacgagaataggaattgtttgttttgtttatgaatgtgtttttagggttagaattatagtatgtgttaaggaatattcgataaatgtgaaggttgagtattgttttttgttcgttggatattttggtttttttcggcggtttgttgatgttttgtgtgtatttattatatttatggtatcggttttttttgattttagagtaagggcgtttagcggatttttacgtatgtgaatggtttttgtagttttagaatttgttatttgggggtagtatatatttaggtaagttttattatcggttttgagtatttttcgtttttaaaattttggattttagaatttcggagtttggtagtttttggggatttatttttgttagttttatttggtagatggggaaattgaggttttagagaggaggtatgatggggaaaattttaaatattggaattagggaatttggtttttaagtttggtttttgtatttatttataagggtataagggggatttggagggggaagtaggaagttttaatttttttcgggttttagtttttttatttgtttgttttgtggggtgaaagggatatttgattaattttaatgtgtcggggaaggttagtagtgaggggtaatagtaggtttagaattttagatagaatattattattttattttatatattagggattgaggtttagaggggatattagatacggtcggagagttatagtatggaaggtatagggtagtatgaaaggttatttttttgttatttttttgttttacgtttattagagatatttttttatttatgttttgatggtttattttttcgttatatttttttatttgttggttgatttttaagtttttttgtagaatattttttgttaaagtagttacgtggatttttttttggtaaatcgttttagttttttttttttgaaaatgggatagggaaaagttgtagagatggggaggaggaattgtgaaaagtagtttgggggtagaggaggacgtgtgttttaggtaggaaagtgtttgtttttttttcgttttcgtttggtttttgtttattattatgtggttacgtgggtttagtttatagttttaggttttaaaagaggagttggaaatttgaattttgatgtgaaattttttgatttttaaatgttggtaataaatttatttaaatatatatatattaagtaaaacgttatggggttaaattgaatatatttgtggtttcgatttggttattggttgttagtttgagatttttttcggttttaggttttgagggtaggtgattgggagaggtggcgttagggggattttggttttttgtgtttatatagttatttacgtattttgggtttttgggtcgtggtggtttaagtttttattatttttattttttggggaaaggttgaatagtattggggtgggggtgggggagtagtaggcggggtttgttgagtaagagttttgtaaaaataagggtttacgttattttagtttgtagtttttttgtaggatatttgggtcggtatcggggtgggatttgcgttgagaagggatgggttatttttagtagggggtggagggtggggaagggtggtaagtatgttttattttagaggttagagggtttagatttttgttggggttgagtttggtttttgggggttggtttgtaaggttcgagtaatattttaacgtattgtgtgattttaggtttatttttttttgtgttttagtttttttatttagaagatgggatttatattgttaggtttgttatgataaatttaagagggaaagttagattggaaagattttatttttttttatttttttatgtgatttggagtagatatatttagtttttttgggttttagtttttttatttataaagtggagataatgataagattgtggtttggcgtagcggtttatatttgtaattttagtattttgggaggttgaggtaagagggttatttgaggttaggcgttcgagaaaagtttgagtaatagagtgagatatatttatttttataaaatattgaaaaatatgaaaaaagaagaagaaaaaagatttgttttttataaattattagtaggattaaatgagttaatatatgtaaagagtttggaatgtggtttagagaaggtggaagtttggtttaagaatatatagtaaattttttaattagttttagtttttttatatttttttgtatttttttagaatttagaaagggaacgtgggcgagtgttttggtttagagaggggagttattttgtttaaggttatatagtttagttaacgaggaatttttttttttttttagttttttttatttatttatttattatttatcgagtattttttatgtattaggttttgttttaggtattagggatatagtagtgaaggtcgtggggatagatagtaagattggtaggtaagataattttgattataatgagaatggtgacggaaatgaagtaggggtgtgagaggagtgattgagggtttagattttttatgggaaggttagggagggtttttcggaggaggtagtttttgggttgagatttgaggagttgttttgggtagaggtggggtgatagtgtttttggtgtatagggaatagtaaatgtatttttttattggtaaatgttgagcgtgttgtgtttaggagtttttcgtgggttagttttttttaagtggtagtttgtagggagattgaggtagatagttaggataatggtggttggcgatagggaaggaaatttattagtaggtgggatagggagggttttttagaagtcgtggtttttagtttagttttgagtgttttattttgtagtgaggaagggttggtcgggtggttttagggaagttgtcgtatttttttgggttttgatttttttttaatttagaggttgttgggaagatttagaaagttagtaggttgggttagtgttttattttttttttttttgttttttatttattaagggtgtttagagatgttatttttttagtttttgggggcggaggttattttagtttagtagataatattaaaggttgagtaatgttcgtttgttcgttggggttagggttggggttagtgggttggggattagtttcgggtaggttgggagtttttgtttaggtggtttgggttaggagtggtagagaggtgggtttagggagttgttttaatggtttaggaatgggttcgggagggtaaagggttttttaatttgagtttatttagtagaggcgggtaagtggttagaaggttttgggtttgtgtttaagtttaggcgggtcgttgtcgttttttcgtttgtgaaatggtagtagtaaaagtatttttttggtggggtgaaaaaagttgaatttcggggtgtaggtttatcgtaagtatagggtagggatttggtaaaaatttattttttttttttttttttttttttgtatattattttttttcgtgaggtttcgtttaagtttttttttagtaattttagaaatagaagtttttggtttttgggattggtaataggttttagggtttagatgagggtattttatttgggatgaatgggggatatgcggttatgtgattttggtatgttacgttatgttttttttgggtttttattggtataattcgtgggggtttcgttttttttgatgtgtagtttataacgtaagttttaggtttgggagtttggtgggaataatgttattattattgatagtagcgatattttttatggattgtagttgggagaagtgaagtgatttatttaaggttatatagtgtggtagggtcgagtatttttcgtttttgttttattttagggtttaggtcgggtggcgtagcgcggggtaagagaagattcgggcgtgtttaagtttcgagtaggcggtaggtgtggtgggcggggttaggggcggggtttcgtggattagggtttagttttaagcggggcgcgattttgttcggtcgcgtcgattttcggggtttttatattgtttgtggtttaagaggggagtcgttataggcgttaagttttttttttaaagtcggggatttggggaggaggtgggagtttacgggaggaagggttacggagatgggtcgttttttttggagttagagttgcgggttggggtttttagggttcggttcggggagtcgattttggtcggtcgtcggggttttgttcggtttttttgaaattttcgttttttttagtagggggcgggtcggggtcgcgtttcggggggaaggcgattaggtcgttttttttttcgattttttcgttttttaggatagtttttagtttagaggggcggttcgggggcggggtcgtatcgttttttttcgtttttaatttcggggcggtcgggcgggggtgggtagggggcgtgaggtcgtttttgcgtttcgggggtttttcgaaaacgcgtttcgggtgttcggttttttcgttgcgttttgtcgtcgttttttcgggggtttcgggcggtcgcggtcgtgtttttcgcgtttcggcggcgcggcgggaggggtcggcgtgacgtagcggttgttacgggtcgtttttataaataatcgggtttaggagaaattttagcgagttagagtcgcgtacgggattgggaaggggatttattcgagggtttagttattagtttttttattaatagcggttatttcggtagcggcggtagtagtagtagcgacgtagcggcgatagtttagagtagggaggtcgcgttatttgcgggtcggtcggagcgggtagttttaggtttttttttcgggtattcgcgtttatgtaacgtttggtggtttgggatttagtatgtttttttttgtcgtcgtcgtcgtttgtttttaaatttatggaagtggttaatttttattacgaggcggattgtttggttgttgcgtacggcggtaaggcggttttcgcggcgtttttcgcggttagattcgggtcgcgttttttcgtcggcgagttgggtagtatcggcgattacgagcgcgttatcgattttagttcgtatttggagtcgttgggcgcgtcgtaggtttcggcgttcgttacggttacggatattttcgaggcggtttcgttcgcgttcgttttcgcgttcgtttttttcgggtagtattacgatttttttttcgatttttttttcgacgattacgggggtaagaattgtaagaagtcggtcgagtacggttacgtgagtttggggcgtttgggggtcgttaagggcgcgttgtatttcggttgtttcgcgtttttgtatttatcgttttcgtcgtcgtcgtcgttcgtcgagtttaaggcggagtcgggtttcgagttcgcggattgtaagcggaaggaggaggtcggggcgtcgggcggcggcgtaggtatggcggcgggtttttcgtacgcgttgcgcgtttatttcggttattaggcggtgtcgagcggtagtagcgggagtttttttacgtttttttcgtttagttcgttcggtacgtcgagtttcgttgacgttaaggcgttttcgatcgtttgttacgcgggggtcgcgtcggcgttttcgtaggttaagagtaaggttaagaagatcgtggataagtatagcgacgagtataagattcggcgcgagcgtaataatatcgtcgtgcgtaagagtcgcgataaggttaagatgcgtaatttggagacgtagtataaggttttggagtttacggtcgagaacgagcggttgtagaagaaggtggagtagttgtcgcgcgagtttagtattttgcggaatttgtttaagtagttgttcgagtttttgttcgtttttttcggttattgttagcgcggttttcgcgcgcgtttttttgtcggtcggggttgagatttcggggagcgttcgcgttcgcgttttcgttttcgttttcggcggcgtcggtaaaattttggtattggggtatttggtagcgcggggagttcgtcggtaattttaatattttattatatatatatatttatatttttgtttaaattaatcgtatatgtagatggggttttcgttcgtggtgttatttaaagaagaaacgtttatgtgtatagatgaatgataaattttttgtttttttttttgtttttttttaggcgtcggcgggcgggtcggtttcgaagttgatgtaatcggtttaaatatggttgaacgcgtgtgtatacgggattgacgtaatttacgtgtaattgttagtcgggttttgagtaatcgtttaaagatgtttttacgggtttgttgttgttgatgttttgttttgttttgttttttggtttttttttgtattataaaaaataatttatttttatgagaaaagaggcgtttgtatattttgggaatttttttcgttttaagtattaagaatatttttaataaatttttttttgagaatggttataaagttttttgggggtagtaattggtttttgttttttatttttttattttattttggatttgtaggattttgtttttgcgtttttggtgtgtagggggttgtgtgtggggggttgttgttatttttggaggttttggtggttgggtgggggtgttgtagttggtttttttgttttttttgttatttttttttttatatatatagggtttgtttgagatggggttttagtttcgggggaaaggggagaagagtaatgggttaggtatttaggttgatttagagtttttaggcgtcgggacgggtggttgggaattttgtttgagaagagatttcggagtttttggttggtttcgagtgttaggtttgggtttggaagggttgggaggtttgtgatttttgttt

SEQ ID NO: 2070 - DNA, 7038 bp, Artificial Sequence
  chemically treated genomic DNA (Homo sapiens)
gggtaggggttatagattttttagtttttttaaatttaagtttgatattcgggattagttagaggtttcggaatttttttttaagtagggtttttagttattcgtttcggcgtttaggggttttgagttagtttgaatgtttgatttattattttttttttttttttttcggggttggaattttattttaagtagattttgtgtgtgtgggagggggagtagtagaggaggtagaaaaattagttgtaatatttttatttaattattaaaatttttaaaaataatagtagttttttatatataattttttatatattagaaacgtaaaaataaaattttataaatttaaaataaagtaaaaaaataaaaaataaaagttaattattgtttttaaaaggttttgtaattatttttaaaaaaaagtttattaaaagtgtttttaatgtttgaaacggaaaagatttttaaaatatatagacgtttttttttttatagaaatagattattttttataatataaaaaaagattaaaaaataaaataaaataaaatattaatagtaataagttcgtaggaatatttttaagcgattatttagggttcggttgatagttatacgtgggttgcgttagtttcgtgtatatacgcgtttagttatgtttaaatcgattgtattaatttcgaaatcggttcgttcgtcggcgtttggagaggggtagagggagaagtagagagtttattatttatttgtatatatagacgttttttttttaaataatattacgggcgggagttttatttgtatgtgcggttggtttggataaaaatatagatatatatatataataaaatattaaaattatcgacgggtttttcgcgttgttaagtgttttagtgttaaagttttgtcggcgtcgtcgggggcgggggcgagggcgcgggcgcgggcgtttttcggagttttagtttcggtcggtagggggacgcgcgcgggggtcgcgttagtagtggtcggaggaggcgagtaggggttcgggtagttgtttgaataagtttcgtagggtgttgagttcgcgcgatagttgttttatttttttttgtagtcgttcgttttcggtcgtgagttttaggattttgtgttgcgtttttaggttgcgtattttggttttgtcgcggtttttgcgtacggcgatgttgttgcgttcgcgtcggattttgtattcgtcgttgtgtttgtttacggtttttttggttttgtttttgatttgcgagggcgtcggcgcggttttcgcgtagtaggcggtcgggggcgttttggcgttagcggggttcggcgtgtcgggcgggttggacgaggaggacgtggagaggttttcgttgttgtcgttcggtatcgtttggtagtcgaggtaagcgcgtagcgcgtacgggaagttcgtcgttatgtttgcgtcgtcgttcggcgtttcggtttttttttttcgtttgtagttcgcgggttcgaagttcggtttcgttttgagttcggcgggcggcggcggcggcgggggcggtgggtgtaggggcgcgaagtagtcggggtgtagcgcgtttttggcggtttttaggcgttttaggtttacgtagtcgtattcggtcggttttttgtagtttttgttttcgtagtcgtcggagaagaggtcggagaggaagtcgtggtgttgttcggaggaggcgggcgcgggggcgggcgcgggcggagtcgtttcgaaggtgttcgtggtcgtggcgggcgtcggggtttgcggcgcgtttagcggttttaggtacgggttgaagtcgatggcgcgttcgtggtcgtcgatgttgtttagttcgtcggcgggggggcgcggttcgggtttggtcgcggggggcgtcgcgggggtcgttttgtcgtcgtacgtagtagttaagtagttcgtttcgtagtagaagttggttatttttatggatttaaaggtaggcggcggcggcggtagggggagatatgttgggttttaggttattaggcgttgtatgaacgcgggtgttcggggagggggtttggggttgttcgtttcggtcggttcgtaggtggcgcggtttttttgttttgagttgtcgtcgttgcgtcgttgttgttgttgtcgtcgttgtcggggtggtcgttattagtgagggggttggtggttggattttcgggtgggttttttttttagtttcgtgcgcggttttgattcgttaaagttttttttgagttcggttatttataagggcggttcgtagtaatcgttgcgttacgtcggtttttttcgtcgcgtcgtcgggacgcgaaggatacggtcgcggtcgttcgagattttcgggaggacggcggtagggcgtagcggagggatcgggtattcggagcgcgttttcggggggttttcgggacgtaggggcggttttacgttttttgtttattttcgttcggtcgtttcgggattgggagcgagagggggcggtgcgatttcgttttcggatcgtttttttgggttggaggttgttttggaaggcgggggaatcggaggagggggcgatttgatcgtttttttttcgagacgcggtttcggttcgttttttgttggaggaggcggaggttttaggagggtcgagtagagtttcgacggtcgattagggtcggtttttcgggtcgaattttggagattttagttcgtagttttagttttaggagaagcgatttattttcgtggttttttttttcgtaaatttttattttttttttaggttttcggttttagaaagaagatttgacgtttgtgacgattttttttttaagttatagataatatgaggatttcgggggtcggcgcgatcgggtaggatcgcgtttcgtttggggttggattttggtttacggagtttcgtttttagtttcgtttattatatttgtcgtttgttcgaggtttggatacgttcgggtttttttttgtttcgcgttgcgttattcgatttgggttttgggatggggtaggggcggggggtgttcggttttgttatattgtgtgattttgggtgagttattttattttttttagttgtaatttatgaagggtgtcgttattgttagtggtggtggtattgtttttattagatttttaaatttaaggtttacgttgtgggttgtatattagagagaacgggatttttacggattgtgttagtggaggtttagagagagtatggcgtggtatattaaggttatatggtcgtatgttttttatttattttaaatgaaatgtttttatttgagttttaagatttattgttagttttagaggttaaaaatttttgtttttgaagttgttagggagggatttaagcgaggttttacgggagggggtggtatgtaggaaagagaaggaaagagaaagataagtttttattaagtttttgttttgtgtttacggtgggtttgtatttcgaggtttaattttttttattttattaggaagatgtttttgttgttgttattttatagacgggaaagcgataacggttcgtttggatttgaatataggtttaaggttttttgattatttgttcgtttttgttgggtaggtttaggttagagggttttttgttttttcggatttatttttaggttattggggtagttttttgggtttatttttttgttatttttagtttaggttatttaggtaggagtttttagtttgttcggggttgatttttagtttattgattttagttttggttttagcgggtaggcgggtattgtttaatttttggtgttatttgttgagttggggtgattttcgtttttaagagttggagaaatgatatttttgggtatttttggtgggtaggaggtagggagggaggggataaaatattggtttagtttgttggttttttgggtttttttagtagtttttgggttggggagggattaaggtttagaggggtgcggtagtttttttagggttattcggttagtttttttttattgtaaaatgggatatttagggttgagttagaggttacggtttttgagaggttttttttgttttatttgttagtgaatttttttttttatcgttagttattattattttagttgtttattttagtttttttgtaggttgttatttggggagggttggtttacgagggatttttgagtatagtacgtttaatatttattagtgaaggaatgtatttgttgttttttgtgtattaagaatattgttattttatttttgtttaaggtagttttttaggttttagtttaaaagttgtttttttcgggaaattttttttgatttttttatgggaagtttaggtttttagttattttttttatatttttgttttattttcgttattatttttattataattagaattattttgtttgttagttttgttgtttgtttttacggtttttattattgtgtttttggtgtttagaatagagtttggtatatagaaggtgttcgatgaatggtgagtgaataaatggaggaggttgagaagaaggagaggtttttcgttagttgggttgtgtgattttaggtaaaatggtttttttttttgaattaaagtattcgtttacgttttttttttggattttgaagagatgtagggagatatgggggaattgaagttaattggaggatttgttgtgtgtttttaggttaaatttttattttttttgaattatattttaagttttttgtatgtattaatttatttaattttattgataatttgtaggaggtaggttttttttttttttttttttttatattttttaatgttttgtagagatggatatgttttattttgttgtttaggtttttttcgaacgtttggttttaagtggtttttttgttttagttttttaaagtgttgagattataggtgtgagtcgttgcgttaggttatagttttattattatttttattttatagatgaggaaattgaggtttagaagagttaagtgtgtttgttttaggttatatgaaaggatgagaaggaataaaatttttttagtttgatttttttttttgggtttgttataataggtttggtaatgtgagttttattttttggatagaagaattgaggtatagagaagggtagatttggggttatatagtgcgttaaggtgttattcggattttgtaggttagtttttaaagattagatttagttttagtaggggtttaggttttttggtttttggggtggaatatgtttgttatttttttttattttttattttttgttggggatgatttatttttttttagcgtaggttttatttcggtgtcgatttaggtgttttgtagggaagttgtaagttaggatgacgtaagtttttgtttttataaggtttttgtttaataggtttcgtttgttgtttttttatttttattttagtattgtttagtttttttttaagaagtggggatggtgggagtttgaattattacggtttagaggtttagagtacgtgagtggttgtgtgggtataggaaattaggatttttttggcgttattttttttagttatttgtttttagaatttagagtcggaaaggattttaaattggtagttagtggttaaatcgagattatagatgtgtttaatttgattttatagcgttttgtttgatgtgtgtgtgtttaagtgaatttattgttaatatttaaaaattaggagattttatattaaaatttaaatttttagttttttttttaaaatttgaagttgtgggttgggtttacgtggttatatggtggtgggtaggagttaggcgggggcggggagggaataggtatttttttatttgggatatacgtttttttttgtttttaaattgttttttataattttttttttttatttttgtagtttttttttattttatttttaagaggagaaaattgaggcgatttgttaaggggagatttacgtggttgttttgatagagagtgttttgtaaaagggtttagaaattagttagtaggtgggaaaatatggcggagaggtgaattattagaatatgaatgggggggtgtttttagtgggcgtggggtagggggatggtagggggatggttttttatgttgttttgtgttttttatgttgtggtttttcggtcgtgtttggtgttttttttgggttttagtttttggtatataaaatgaggtgataatattttatttgggattttgggtttgttgttattttttattgttggtttttttcgatatattagagttaattagatgttttttttattttataaagtaggtagatggggaaattgaggttcgaagaggattagaattttttatttttttttttaaattttttttgtatttttgtgaatgggtataagagttagatttaaaagttagattttttgattttaatgtttgagattttttttattatgttttttttttgaggttttagtttttttatttgttaagtggggttggtagagatagatttttaagggttgttaggtttcgaggttttgagatttaggattttggagacgggaggtgtttaggatcggtagtgaaatttgtttgagtatatattgtttttaggtggtaggttttgggattgtaggagttatttatatgcgtgaagattcgttgggcgtttttgttttgggattaggaaaggtcggtgttatggatgtgatagatgtatatagggtattagtaggtcgtcgagaggaattagagtgtttaacgaatagaaaatagtgtttaatttttatatttatcgaatgttttttggtatatgttgtaattttggttttaaagatatatttatggataagataagtaatttttgttttcgtggagttgaaatttttttgggggaagataagtattaaataagattaatgattaaagtatagattgtattagattttggttagtattatggaggaaaatatagtaggggagtagagtaggagttttggg

SEQ ID NO: 2071 - DNA, 5336 bp, Artificial Sequence
  chemically treated genomic DNA (Homo sapiens)
taggatttggtgattcggcggtggttttttttggtttcgattttttttttgtttttttgtttattattggttggttaatttttttagtgtttttttttttaggtagtttttttagttttgtttatttgttttatttgagtttgttttagtttttagtttgagtttttaagtagaattaattttttttattttagttgatgattttttgtgtagagtttgtattggggtttttttaataagagttgatgttgtatatgtttagttgtgttattttattgatttttttttaggattttaggagggagggaatattttatagatggggaaattgaaatttagagatgttaaataatttgtttgaagttatagttagtgaggttaaagtgggattaggatttaaagttaataaatttttaaagtttagtattgaggaggttgaagagggaggattgtttgaggttaggagttggagttttgtttggataatatagtaagattttattttttaattaagaattaaagttagtaaatcggttttagagaattaatggttgatttgaagaaaggtgggaataggtaggaaggatgtttattggggaggttgttgtgtttaaatttttggtagggattacgtgattgtagttttttttttttaagtagtatagttttttattttattgtgttttgtgatttttagttagtttttgttttttttttgattttagttcgtttttttttcgggttttgtagaatttaggggtagggtattgggaggaagtaatgttgtttttggttgtattttgtagaggagtagattataaggatagagtttagtgttttgtttggagtttgttttgtgtttgatttgttgagtcgggttatgttttgtggataaaagatttgggttttttttgaagttttttttaggtttagtggtttacgtgtaattaggtgtgatttttgaggaatttggattaaatattggtttggtaacgttatgtagttttttgtttggatgttgttaaagtagtttttgtgggttttagggagagtaggggttgtggataggggaggttagttggaggggaggttggtattttttaagtttttttttttgtgtatttgttttgggggatattaaggtttttaattagtttttgtttggggggttttattttgatatttaggtttgaaggttttgagggttatttttttattgttatttgttgttgttgttttcgttatagttgtttggttttcgtatattgttattttgttttaggtaggttcgtatagggtcggcgttttgggagggtggaaggattgttgggtttatgattggatatttttgttatttaatttttgatttatttgtacgttgagattagtttggttaatatagtaagatttttgttttaatagaataaaaataaaaataaaatgattttttgtttgtatattggggataaaaatatttattttagaaagttgagggttattagcggcgttaggtcggagtcgttttagtgttaggtttattgtttgttataggtagttttgttttttggattttatatttgtagttttgattttgtttgtggagggaaagtgtaggggaaagaaagagattagattgttattgtgtttatgtagaaagaagtggatataagaaattttattttgttttgtattaagaaaaatttttttgttttgagatgttgttaatttgtaattttagttttaattttgtgttcgtagaaatatgtgttgtgttgatttaaggtttaatgggtttagggttgtgtaggacgtgttgtgttaaaatgtgtttgtaggtagtgtgtttggtgaaagttatcgttattttttagttttgagtatttagggatacgatgtattgcggaaggtcgtagggatttttgtttaagaaagtttgggtgttgtttaaggtttttttcgattgagatagtttgagatatggtttcgtgataagggaaaaatttgattattttttagtttaatattcgtaaagggtttgtgttgaggaggattagtgaaagaggaaggtttttttgtagttgagataggaggaaagtatttattttttgtttttttttgggaatggaatgtttcggtgtaaaattcgattgtatattttatttattgagatacgagaaaattgttttatggttggaggtgagatatgttggcggtaatatcgttttttattgtattgagatgtttgtgtaaagttagatataaatttggtttacgtgtatatttaggtatagtatttttttttaaatttatttatgatatagagatttttgtttatatgtttttttgttgattttttttttattattattttaaagttttgttatattttttttattgaaatagtagaaatagtgattaataaatattgaaggaatttagagattagtgtcggcgcgggttttttatatgttggtattagttttttgggtttattgttttttcgttatattttgtttttgtgttttatttttttttttagttttattttatttgacgagaaataattataggtgttggggggaggggttgttttttttaggaaaggggaaagggggtttttttttatgggggatttgggaagtaggttaggtttttagttaggagggtgagagaggggagggttggttttttgagaagttgtagttgttgaagatagaggaagttttgagtgtggtttttaagtttttttttttttttaagtttgtttttaggggttgtagttattttttttagaaatagaaatttaagttttttaggttttgtggggtagtaggtgggtagttgtagaaatttttaaaattgggcgaagaggttgtacggggtatagagtgtaggaattttaggtttaagggatatttgttgtttggttagtttagaggggtcgtttgtttttttatatgggttggttttattaagtttaaaaaatgttggtttggaataggacgaagtatgttaaggagtaaagaggtatgtgttttttttgtagtgattatggggatgagataggagaaaaggtttttatatcgatgtttatataggtagaggcgaataggttttttttgtttttgggttttggttttggtgttttttgttttgaggtatttattcggggttttttatatttggaacgttattgttttgtgtttttttggttttagtagtatcgatttgatgttatttggtttgttgggttgttggtttatggttagtttttttttagtagtaggcgttgtgtatttcgttgtttgttgtatttttagcggttggtatttgttaggtgtttattgtgttattgttggagggatttgtattaaatatatttatagataagagttttttttttttttgttttatttatagagtaatagatgagggtttttgatggatattaattttatattttttattttttttttttaatagttgtataatattttatagtaagtagatgtttttttatttttggttattttcgtttgatggggtatcgggttgtatttagttatgtttgtttttttttttatagattttttggtttattagtggagagaattgagatattttttttaagggttgtatttttagaaggggagattgttgggttacggagttcgaatattgttaacgttaatagattttgttaaattattttgtaaaaagtatgtagtaatttaagttgtaggtagcgtgtggacgtttgttttttcgtattttagtttaaagttagtaatggttggggtcgatttgggagtgttgggggtaggggtaggtggagttattgtttaatttgtatgattttggttattcgtgagattagtttttttttttaatcgtatttatgtttattgtttattagcgtttttttttatttttgtttgaagttttcggggattgtttttgggggtcgggtaaatttgttttttgcgaagagggtttagggttggggtttggaaatttcgaggttgtatttgttagcggttttttaaggttatagcgttttcgtggtttttggttcgtagtttttcgagatttaggatttgtttaaggttagggtatcgcgggtgttttcgggttgggtcgtagttagattgcgtttttcgcgcgttttcgttttgtattaggatcgtttaggaaacgtttgcgggtattttgaggaaggtcggcggtttcgggttagttcgtattggtcgggggtggggcgggggtcgtatttgttgcggaagtttcgaaagttttcgttcggtttttcgtcgtcgtcgcgggggttggttggattaggcgggtaggttcgaggatgcggatgaatttaagcgttttcgagtgttcggaggtttttcgttttagtttttcgtttagaggtaagggcgtgcgaggggatttagatatttaaggatttgaggtttcggtttcgaggttttgggcgggggattgggtaggttgcgcggggttttagcgaggggatagttcgggtgggcggttagggtgttgggggttgcgggcggcggataaagcggcggtattatttcgcggcgcgggttaatggaatgaatgggttataaatagtcgttaatgggcggttcgcgttgtgttttttaagagtcgcgggagcgcggagcggtcgttgttcgtttgcgtcgtttcgggagttgtcgacggacggagcgttttcgttttcgttcggtcgttcggtgagtgggttcgggggtcgggggcgttcgcgttcgggttaggggcgttgcgtgtaaagggggcgcgtcgtttggagcgcgcgtcggatcggtcgggggttttcggcgatgatggcgtttttcgcgcgcgttgcggatttcgttgattttggtcgcgtttcggggggcgtcggggggttcggcggcgggggtttgagtggtacgcgggagttcgggaatttcggcgtgtcggttttttttgatttcgcgttttttcgtagttcgtcgtcgttatgtttttttttaatagttataacgtattgaagttgcgtttttcggtcgaggacgagtttttcgatttgagcgtttataataattatatggttaaggtgttgattttcgagttgtacgcggattgcgcgttaagagtacgtcgagcggttttacgttggacgacgttatttagataggcgtggataattcgggtacgcgatttttcggggtcggggtttcggtttttttttttttcgcgtagtcgtagggtttttagtagcgcgttcgggttcggtagtgacgttattgttttcgtttcgcgtttttttttttagg

SEQ ID NO: 2072 - DNA, 5336 bp, Artificial Sequence
  chemically treated genomic DNA (Homo sapiens)
tttgggggagggggcgcgggacggggatagtgacgttattgtcgggttcgagcgcgttgttgaggattttgcggttgcgcggggggagggggggtcgggatttcggtttcgaggggtcgcgtattcgggttgtttacgtttgtttggatgacgtcgtttagcgtgaagtcgttcggcgtgtttttggcgcgtagttcgcgtatagttcgggggttagtattttggttatgtggttgttgtgggcgtttaggtcggggaattcgttttcggtcgggaagcgtagttttagtgcgttgtggttgttggagaagggtatggcggcggcgggttgcggggagacgcggggttagaggggatcggtacgtcggggttttcgggttttcgcgtattatttaggttttcgtcgtcgggtttttcggcgtttttcgggacgcggttaaggttagcggggttcgtagcgcgcgcggggagcgttattatcgtcggggattttcggtcggttcggcgcgcgttttaggcgacgcgttttttttgtacgtagcgtttttagttcgggcgcggacgttttcggttttcgggtttatttatcgggcggtcgggcgggggcgggggcgtttcgttcgtcggtagttttcggagcgacgtaggcgaatagcggtcgtttcgcgttttcgcggtttttaaggggtataacgcgggtcgtttattggcggttatttatagtttatttattttattggttcgcgtcgcggggtggtgtcgtcgttttgttcgtcgttcgtagtttttaatattttggtcgtttattcgagttgttttttcgttgggatttcgcgtagtttgtttagtttttcgtttaagatttcgaggtcgaaattttaggtttttggatatttggattttttcgtacgtttttgtttttgggcgggaaattgaggcggagagttttcgggtattcgaggacgtttgggtttattcgtattttcgagtttgttcgtttagtttagttagttttcgcggcggcggcgaggggtcgggcgaaagttttcggggttttcgtagtaggtacggttttcgttttattttcggttagtgcgagttggttcggagtcgtcgattttttttaaggtgttcgtaggcgttttttgggcgattttggtgtaaagcgaaggcgcgcgggaagcgtagtttggttgcggtttagttcgggggtattcgcggtgttttgattttggataagttttgggtttcggggggttgcgagttagaaattacggggacgttgtggttttaagaggtcgttggtaagtgtagtttcggagtttttagattttaattttgggtttttttcgtaggggataagtttattcgatttttaaaggtagttttcggagattttaggtaaagatgggaggaaacgttaataaataataagtataagtgcgattaaaaaaaaaaattgattttacgaataattagaattatgtaaattaagtagtgattttatttgtttttatttttaatatttttagatcgattttagttattgttggttttgagttggaatgcgggaagataggcgtttatacgttgtttgtaatttaaattgttgtatgttttttgtaagataatttggtagaatttattaacgttaataatgttcgaatttcgtgatttagtaatttttttttttaggaatgtagtttttagaaaggatgttttagttttttttattaatggattaagagatttgtggagggaaaaataaatataattggatataattcgatgttttattaggcgggagtggttaagggtagggaggtatttgtttgttgtggaatattatgtagttgttaagagggggaagtggaggatgtggggttaatatttattagggatttttatttgttgttttgtgaataaagtaaagaaggggggaatttttatttgtgggtatatttgatataaatttttttagtagtggtataatgagtatttaataggtgttagtcgttggggatatagtaggtagcgaggtatatagcgtttgttgttggaagaagattggttatgagttagtagtttaataaattagatgatattagatcggtgttgttggggttagggggatatagagtagtggcgttttaggtataagggatttcgaataggtgttttagagtagaaggtattagagttaaggtttaaaggtaggggaagtttgttcgtttttgtttatgtgagtatcggtgtgggggtttttttttttgttttatttttatggttattgtagaggagatatatgtttttttgttttttggtatgtttcgttttgttttaagttagtattttttagatttaataaaattaatttatgtaaaaaggtaaacggtttttttgggttggttagatagtaggtgttttttaagtttggaatttttgtattttgtgtttcgtgtagttttttcgtttagttttagaaatttttgtagttgtttatttgttattttataaaatttgaagggtttaagtttttgtttttggaagggatagttgtagtttttggaggtagatttggggggagggagagatttgggggttatatttaggattttttttgtttttagtaattgtagttttttagaaggttaattttttttttttttatttttttggttgagagtttaatttgttttttaggttttttatgggaaaggattttttttttttttttttgaagggggtagtttttttttttaatatttgtggttatttttcgttaggtgggatgagattgagaaaagaaataagatatagagataaagtatagcgaaagaatagtgggtttagggaattggtgttagtatatggaggattcgcgtcggtattggtttttgagtttttttagtatttattgattattatttttattattttagtgagggggatgtggtaggattttagggtaatggtggggagagggttagtaggaaaatatgtgagtaaaggtttttgtgttataaataagtttaaggaaaggtgttgtgtttggatgtgtacgtaggttagatttatgtttgattttatataaatattttagtgtagtaaagagcggtattgtcgttagtatgttttatttttagttataaggtagttttttcgtattttagtaaatagaatgtataatcgggttttatatcgagatattttatttttagggaggagtaggagatagatgttttttttttattttaattgtaaagaggttttttttttttattaattttttttagtatagattttttacgggtgttgggttgggggatggttaggttttttttttgttacgaggttatattttaggttgttttagtcgggggaaattttggataatatttaggtttttttgggtagaggtttttgcggtttttcgtagtgtatcgtgtttttgggtatttaagattggagaatggcgatggtttttattaagtatattgtttgtaaatatattttaatatagtacgttttgtatagttttaaatttattaaattttgagttaatatagtatatgtttttgcgagtatagggttggggttagggttatagattaatagtattttaaggtagaagaattttttttagtatagaataaaatggagttttttatgtttatttttttttatatagatatagtagtagtttgattttttttttttttttatattttttttttataggtaaggttagaattgtagatatgagatttagagggtagggttgtttatggtaagtagtgagtttggtattggggcggtttcggtttggcgtcgttggtaatttttagttttttgaggtgggtgtttttgtttttagtgtgtagatagaagattattttatttttgtttttattttgttgagatagggattttgttgtgttggttaggttggttttaacgtgtagatagattagaagttgggtgatagaggtgtttagttatgggtttagtaatttttttatttttttagagcgtcggttttgtgcgagtttgtttggggtaaaatgatagtgtacgggggttaggtagttgtgacggggatagtagtagtagataatagtggggaggtggtttttaaggtttttagatttaaatgttagggtgagattttttaggtaggggttgattgggagttttagtgttttttagagtaggtgtataaggagaggggtttggaaggtgttagttttttttttagttgattttttttgtttatagtttttgttttttttggggtttataggggttgttttggtagtatttaggtaggaggttgtatgacgttattaggttagtgtttggtttaggttttttagaaattatatttggttatacgtgaattattgggtttggagggggttttaaaggaggtttaggttttttatttatagaatatgattcggtttagtaggttaggtatagggtagattttaggtagggtattggattttatttttgtagtttgtttttttgtagagtgtagttagaggtagtattgtttttttttagtgttttgtttttgagttttgtagagttcgaagaggaagcgggttgaggttaggagagggataggggttgattggggattatagagtatagtggggtaggaggttgtgttgtttagaggggagggattgtagttacgtggtttttgttagggatttgggtatagtagtttttttagtgggtattttttttgtttgtttttatttttttttaaattagttattggttttttgaagtcggtttattggttttaatttttaattaagagatagggttttgttatgttgtttaggtagaattttaatttttggttttaagtagttttttttttttagtttttttagtgttgagttttgggggtttattggttttaaattttaattttattttgattttattggttgtgattttaggtaagttatttaatatttttgagttttagtttttttatttgtaaagtgtttttttttttttaggattttggggagaagttaatgagatggtatagttgggtatatatagtattagtttttgttaggggagttttaatataaattttgtatagggaattattagttgaggtaggggggattggttttgtttgaggatttaggttggggattggggtaggtttagatggagtaggtgggtagggttgaggaggttgtttggaggaaggggtattggaggagttgattagttagtaatagatagagaggtaagagggaagtcggaattaagggaaattatcgtcgagttattaagtttta

SEQ ID NO: 2073 - DNA, 15046 bp, Artificial Sequence
  chemically treated genomic DNA (Homo sapiens)
taagggaggagattattttttatattgttttatgtttaatttttgtttttaaagaaagaaaaagtaaaaattaaaaggtagaaatgaaatttataggtagatagtttagagtcgtgtttcgggtttggttaaagattgattttcgatttaatcggttatgttatttatagattttagatattgtatggaaaagtattgtgaaaaatttttgttttgttttgttttattatgattattagtgtatgtagtttttagttatgtattttttgtttgtttaattacgatttttttatgtggatttttttagtgttgtaagtttttaaaagggataagaattgtttatttagggtattcggtttttggagatgtgagttttgtcgaagtttttggttaaataaagtttttttttttttaattcggtgtttgaggggttttgtgtgtggtttgttttgttatattttttggttttttgatcgggaagcgaggtgattaacggatagttgaggtagttttttaggtagtttaggtttgttttgtggagtatttttgcgggggattttagttagtttgagtgatatggattttgagagtagtttttggtaggtaattgttttggtggaatgttttattagagtagtgtatggtaggtttttgtggaggattaacgtagtggttgaatattaggaaggaattggtatttggagttcggatatttaataatatttgtatgggatttgtatgtttaaaattatataacgttgatgaacgaaattagaaagttgaataaatggaaagatataatgtgtttatggatttagatttaatattttaaagatgttaatttatattaaattaatatataggtgtagtataatttttattaatatcgtagtaagattttttggagatatatataaataatattattttaaaatttataagaaaaggaaaaggaagtagaatagttaaagtaattagggtaaagtataaatatagtggtttacgtttgtaattttagtagtttgggaggttaaggtaggcggattatttgaggttaggagtttaagattagtttggttaatatggtgaaatttcgtttttattaaagatataaaaaattagttaggcgtggtggtatttgttaggagattgagattagtttggaagatatagtttaatattatttttataaaaaaattaaaaattaatggatatggtagttttagttatttgaaaagttgaattgggagggttatttgagtttaggagtttgaggttatagtgagttatgattatattattgttttgtattgtgggcgtaatttgtttttaaaagaaaataagggttaggcgcggtggtttaagtttataattttagtattttgggaggtcgggtggattatttggggttaagagttttagattagtttggttaatatggtgaaattttatatttattaaaaatgtaaaaattaatttggtatggtggtgtatatttatgaaattttgtatttattaaaaatgtaaaaattagtttagcgtggtggtgcgtatttatagttttagttattcgggaggttgaggtaggagaattgtttgaatttgggaggtagaggttgtagttagttaagattacgttattgtattttagattgggtaatagagtgagatttttttttaataaaaaaagaaaagaagaaaagaaaaaagattgtatggtgttggtggagggaaagatatatagattaatgaaatagaatagagaatttagaaatagatgtatataaatatgtttaattgatttttgataaatatttaaaagatttaaaatggaggatatatagtgttattaataaatagtattggagtaattggatattaagaggtaagtaaataaataaaaatgaacgttgatataatttttatataaaaattaatttaggttatggtttatacgagtaattttattgttttgggaggttgagttgggaggattgtttgagtttagaaagtaggggttgtagtgagttatgattttgttattgtattttagtttggataatagaataaaaaataaataggttgggtatagaggttttcgtttgtaattttagttttttgggaggtcgaggtgggtagattatcggaggttaggagtttaagattagtttgattaatatggtaaaattttatttttattaaaaatataaaaattagttaggcgtggtggcgggtgtttgtagtttttagttattcgggtagttgaggtaggagaattatttgaatttgggaggtagaggtagtagtgaagaaaaaattgatcgattagattttattataatttagaatttttggtttgtgataggttttattaagagaatgattaaaaaaaaaaaaaagttttagagttaaagaaaataattcgtaatttatatatttgataaagtattgttattggtggagggtgtttttggtattttgaatagagaattggataaaacgtataaataaagtaaggaaagaatgaagtaataaaaatagagatttattgaaaatgaaagtacgttttatagggtgggagtaggttcgagtataggggtttaagggttttgttatagaatttttgggggtttaaatattttttagaggtttttattggttttttggtgtatgttttatgtaaatggagaggatgaggtaaagttagaaagttatttatttttcgtatgttttatgtaaatgaagaggatattttttgttatagttgaagtgtgaattggttttatgttttttgtttttagattttatttttttgttttagtattattatttagaatatataaagaatttttaaaatttaataatttaataagagtagatgtaaaagatttgaagagaattttattgaagaagtatataaatataggaaaaatgtttaatattattagttattagaaaatataaattaaaattataagaggttgggtatggtggtttatgtttgtaattttaatatttgggaggttgaggtgggaggatagtttgagtttaagagtttgagattagtttgggtaatgtggtaaaatttcgtttttataaagattataaaatttagtagggtatggtagtgtatgtttgtagttttagttatttaggaggttgaagtgggaggtttatttgagttttagaggtgaaggttgtagtaagttttgtgattacgttattgtattttagtattggagatataatgagatttagttttaaaataaataaataaataaataaaattataatatattataatatatttattagaatgattaaaaaatagtgataatgttaaatggtagttaggatgtggagaaattgggattataggggtgagttattgcgtttagtcggaaatgtttaaaagttattttgtatggtgtaaaaggggagtaatttttagttttgagggaaatttttgttttttttttagggatatagaaaatttatgaataatttattttttgtttagtatatagttaagaagtaattataagtatatttgattgagtatatttatagtatgggttcgttgttttgtttatggagtagttatttttttatttttttaattttttaataaatttgattttagtcggaggtggtggtttatgtttgtaattttattattttgggaggttaaggtaggtagattgttggaatttaggaattcgagattagtttggttattatggaaaaattttatttttataaaaaatataaaaattagttgggtttggtggtttatatttgtggttttagttattaggaaggttgaggtgggaagttatttgaattcgggaggtagagtgtattacggtattttagtttaggtgatagagtaagattttaaaaaaagaaaatttaaaaatttttatttttagttaaaaaattttgtttttaatttatttattgattttttggtatttataatttaattagtttagtgaatttggggaagttatttttttttttttttttaagatagaattttgttttattgtttaggttggagtgtagtggtacgattttgatttattgtaatttttattttttgggtttaagcgattttattgttttagtttttcgagtagttggaattataggtatatgttattatattcggttaatttttatatttttagtagagttggggttttattattttggttagggtggttttagatttttggttttaagtgattcgtttattttggttttttaaagtgttgggattataggcgttagttattgtttttggtttttagttattttttaaattttttgaattttgttttttttaaattttttaaataaggataatagtttataatttttaatttttgttatgaaaattaaaggagttaatatatattatgtggagaaatgtaaattttagtttaaaaaatagaagaaataatgtaaatattgatttatttatttggtgagaaatgtaaggatatttttgtttggtggtgggtattaaaaggttaaggtatttatattttattggatatatttggaagaatgattaatagtgttattttaaaattttaatattgagaatatattaggatttatattttttttaatttattatgatgaaaaattttgttagcgaaatgtgttaggattgttttataaaaattttttacgtcgatgagtaaatattttagaagattattgttgaggagaaatgttatttatttagagagttgttttaattaggagattttatatagcgtttagtagaaatgtaataaaggtattttatttatttttttttttagttttgtcgtgaataaaattgaatgaaattaattacgtttcgagttttcgtttagacgtagtttgtagtagttaggttttattattaggtggtatacgttaaaggtttcggcgggggcgagtcgttcgagtacgtttttcggtggtttcgtggtatttttcggttttcgttgagtattaagtaagatggtagttttcgagacggttaggttacggttttaatttgattattcgtcgttagttatttcgtattgtacggttttttggtttttggtcgatttgaatagatgtcgagtcgttatagattttattagttttattcgttagcgtttcggttttagttttggggtttttttaggtttttatttggagggggggtttttgtttttcgtcgagagcgcgcgttttgtgagagataacgattgttttaggtgcgcggcgtagggagcgggacggtcgggtgggcggcgggcgggggacgcgtttgcgtacgttcgggtttgaagtcgttagatttggtagtggaggggatgggggatggggaaggggacgagggttggaggggggtggggttgtaaaaatgtacgttcgcgaatttcggagattttgattggtgtagttaattttggggtttaggaatttgtattttattattattttttattattatttttttttttttgagacggagttttgttttgttatttaggttggagtatagtggcgcgatttcggtttattgtaatttttatttttcgggtttaagtaatttttttgttttagtttttcgagtagttgggattataggcgttcgttattacgttcggttaatttttgtatttttagtagagatggggttttattatattggttaaggtggtttcgaatttttgattttagttgattcgtttgtatcggttttttaaagtgttgggattgtaggcgtgtattatcgtattttgtttttattatttttatttttgagattgagttttattttgttatttaggttggagtgtagtggcgcgattttagtttattgtagtttttatttttcgggtttaatcgatttttttattttagtttttcgagtagttgggtttataggcgggcgttattatgttcggttaattttttgtttgtttgtttgtatttttagtagagacggggttttatcgtgttggttaggttggttttgaatttttgacgttaagtgattttttcggttttttaaagtgttgggattataggcgtgagttttcgcgtttggttggaatttgtagtgtaacgagtatttttttcgggatgtttttgatgataggagaattaaatttggaaaatttttgatgtttaagggtagggttaggtttttttttagttttgatttagtatattcgcgtttagttaggtattgtgcgattttgttgcgtgtttatggtgtagatgtgtcggagattcggttttatttatggcggtttttagggttaggtgtaggaagttgataaaggggaatcgttgtgttttttttataatttgttgttgtttagttttagtttttatgtgtttagtgttttttgagatttttggtggcgtattattttgtgttttatttagatattttgggatttttttaaataagtgttttgagtttttttgggttgtaaattgggaaatataaaataattttaaatatgtttttggaagttaaaaaaatgataatgagatgagtatttaggagtaattgtagtgtgaattgttgaaatgtggttgagttgttatagtaagatgatggtatttgattattttagtttggatttatattttggattgatttatttagattttttttttttttttttaaataaagagattgggttttttatgtttaggttggagtgtagtggtacgattatagtttgttgtaattttgattttttgggtataggtaatttttttattttagtttttcgagtagttgggattttaggttaggtaattacgtttggttaatttttgtatttgttgtagagatagggtttcgttatgttgtttaggttggtttcgaatttttgggtttaagttgtttttttattttagttttttaaagtattgggattataggcgtaagttattgtgttagtttttttttttttattttttttaagttttagttatagtgaattaattttagagttgtgaattaggttatttttttttgttgttttttgtcgttgaatattttttatttttaagtatgttagatttcgtaagatttttttagaatattagggaatttaatttggaatagtaattgtatttttaaattaggatattatgatttattgaataatgtttaattgttttaaatgataatttgaaataatttaaattttaaagagttttttttttttttttttattgattgtgaaataggtttttattttttttgtaatttaaggattatttaaatgttataattttaaggattgtgttttattttattaagtttattttttgaattgttttttgtttaatgagttaataatttgtgttaattataattatattttaatgaattatgtgggtattatattttttataatgaagttaataatgataaaaataaattatgaaaattgttataagtaataattataatacgatgataggtaaattttttttaaatgttttaaatgtatagttgtatgtggtaaaaaatatttttttagtggttttagtggtaaatgggtagatcgtagaaaaagatgaatttggaaagttcgtttttgtttttgttgttttatgtttataattattgtttttttttggtaaatttatttttttttagagttacggaagaatatatagtttttatttttaaagtatttaatattgttggattgggatttaaataatgagttttatgtttttgtatattattttttgtgatatagataattagattgaatagttagattaagttatatggtaagtgtagaagttggttgagaaaagggagattagtatggaataaaatggttagggaattgagtagtattttgaagaatgggtgggaaatgttggatgattaaagtatagttatagagataaaagttggttggatttggtaaaaagatgagtttgattagttaaagtattttgttgggattattggtagtattgagaaggttaatgaggaaaagtggaattaggttgtgggaattttgagaaatagtttttgaggttttggatgtattatatatttgtgttttattgttgtttttttatagtttatttttttaagttttaggaatttggttttatttgtttttaggtttttgatagcgagtttttaaaggtggtttttaattgttttgggaggaggaggaggtgtttttattggtttggagttttttgtgttagtttgttggggttgttataataaaatattatagattgtatggtttaaaaaatggaaatttattttttatttttttggagattataagtttaagattagggtgttggtagatttggtttttttattttattttaattaattaattaatttatttattttttttgagatagagttttattttgttgtttaggttggagtgtagtggtacgattttggtttattgtaatatttgttttttaggtttaagcgatttttttgttttagtttttcgagtagttaggattataggtattcgttattatgttaggttaatttttttgtatttttagtagagatggggttttattatgttggttaggttggtttcgaatttgtgattttaagtgatttgttttttttagttttttaaagtgttgggattataggagtgagtaattgtgtttggcggtttttaattttttttaattaatttttaaattttttttaatcgtgtagtttttagaattatagtagatttagagagatttttttattttttgagatagggttttattttattgtttaggttggagtgtagtggcgtaattttggtttatatagtttcgaatttttgagtttaagggttttttttgttttagttttttgagtagttgggattataggtgtagttttttatttttagtagagaggttttattaagttgtttaggttggttttaaatttttgggtttaagtagttttttcgttttggttttttaaagtgttgggattataagtttgagttattgttttcggtttgagaaatttttttttgaagaattaattttgtaaggaaatagtgtattttgttttttttgatttttttaattttggtaattaatatttgatgaaggttgggcgttatgttttatgtttataatttagtattttgggaggttgaggtaggtagattgtttgagtttaggagttcgagattagtttcgataatatggtgaaattttatgtttatagaaaaatataataaaattagttgggtatggtggtatatgtttgtagttttagttgtttgaggggttgaggtgggaggattatttaagtttgggaagtaaaggtttcggtgagttgagatggtgttattgcgttgtagtttgggcgatagagtgagattttattttaaaaaataaataaataaacgaataaaaaaatatattgattaaatgttagagatgggttaggtatgttggtttatgtttgtgatattaatattttgggaggtcgaggtgggaggattatttgagtttaggagtttgtgagtagtttgggtaatatagggagatttttattttattaaaaaaattttaaaaaataaataaaaaaaattagttaggtttagtgatggatgtttgtagttttagttagttgggaggtttaggtgagaggattatttgagttttagaagttgaggttgtagtgagttatgatcgtgttattttattttagattgggtagtagagtaagatcgtattttaaataaaataaaatattagagacgagtttttattttatattgttgtagttagtggttttttggatagtttaagataaaaagttttttattatttttattatatatttttttttatattttattttttagaagtatttttggttaagtttggggtatggggtatattttagagttagatttttatatatgtgtaattatatgtatttatatttttaaattataaatattataatatattgttttgtattttgtttttttatttattatgggttattttagtatataaagtgtgtgatgtatgttatttttttttgtttgttatatagtgttttagtgaatatttttgtattttttttgtatttggaaaattatttagttggatttatttttagaagaaatatttattggtttaagagaaggtatatataaaaattgataagtattgttaaattagtttttagaaaagttgtatagatttgtataatttttaaaaatttattaatttatttatgataggattaataatatttattgtattaataaaaattagagttaatatttggatattatttgttttgagttaggtatgttttttttgtataataagttattgagtattgtaattattgttattatttttatttttatagatgagaaaggttgaggtaatgattttaaaaaaaattatagtggtagaaatagtatttgaatttaggtatttacgttggttttggtaggtaatgggtagggagtattaggttggatagatgggtatgttagtgtttttgtataatagaattttagatagtaaattgtagattttaagggtggatttagattttgataatattatttagtttgttttgtaaagagttagaatgaaaagtggggatagttgggtatggtggtttacgtttgtaatgttaatatttttgggaggtcgaggcgggcgaattagttgaggttagttcgagattagtttgattaacgtggtaaaattttatttttattaaaaatataaaaagttagttaggcgtggtggtaggtatttggaattttagttatttgggaggttgaggtaggagaatcgtttgaatttaaggggaggaggttgtagagagtttagattatgttattgtagtttagtttgggcgatagagtaaaattttatttcgaaaaaagaaaagtggggatttgttttttggaattaattttttcgttattagtgatttaggtaatttatttttatttgtgaaaggataaatgtatgtatttttgtttgtaaaaggatagttttattttttgtttgtgatttaggtaaagaaatagagaatattgttagggaaggtgtatttgataggaatggtaattaagtagatttaggagaattatttttttttttttggatggtattttgttttttaattttaatattttttttttttttttttttttagatgagggtttattgtgttgtttaggttagttttgaatttttgggtttaagtgattttttttttgttttttgagtagttgggattataggtatgtgttattatattagtttataattttaatattttaaaaattgaaattatttttttggggaatagtaggtagtggggttgtaggaattataggttatatttttaagttaaatagttgtagatgtatggtttttttttttttattttttggagatagagtttttatttgtcgttaggttggagtgcggtggcgtgattttggtttattgtattttttgttttttgggtttaagcgatttttttgttttagtttttcgagtagttgggattataggcgtatgttattatgtttagttaatttttgtatttttagtagagattgggttttattatgttggttaggttggtttcgattttttgattttgtgatttgtttattttagttttttaaagtgttgagattattataggtatgagttatcgcgttcggttaatgtatggttttaagaatggatgagacgatgttaagagttgttttggaaggcgtgagggtgttgttagtttttaggaaaggaaggggtttttattaattggatgttatatgtgttgttttttagggttttaataaattatagtgattgaatagagatttgtaattatttttaatatttgatagaaagtttggttttatttggttattttagaattgaagtttggattattgttataagtgaaaataaattgattagaaatgttaagaaaaaaatttgatattgtagcgtttttatggtagtttttagatttataggatgttaaattggtttttgttagattaagaattatttttttgttattagatgttaagttgggaatagaggggaatgtgtttttataatttaaaatttttggttatttagtattttatttgttttttttttttatttttgatattagtaatttttattttattttgatttgtttgtttgtatagttagttttttgataaataattgaggattttttttaattatcgtattgaggtaaatttataggattattatgttttaaaaaatttaaagaatgtttgttatatatgtttttattatttattagttgttttttatttttaaatatgattgtttatatttttttttggttattgaaaaaatttgatgaaatatatagttgaatgtaaatgttttgtaagtataatgtgtgtttttagtagtggcgtaattatagtttattgtagtttggattttttgggttttagtgatttttttattttaggtagttgggttataggtatgtattaattatatttatttaatgtttgtatttttttttttttttttttttgagacggagttttgttttgttgtttaggttggagtatagtggtgtgatttcggtttattgtaagttttattttttaggtttacgttatttttttgttttagtttttcgagtagttgggattataggcgttcgttattacgtttggttaattttttgtatttttagtagagacggggttttattgtgttagttaggatggtttcgattttttgattttgtgatttatttattttgattttttaaagtgttgggattataggcgtgagttatcgtgtttagtttgatgtttgtattttgtagagatagggtttttttatgttgtttaggttggttttaaatttttgggtttaagttattttattattttagttttttagagttttgggattataggtatgagttattgtgtttggttaataggtatttttgagtatttataatttgtttaatattgaggatagttttaagatttttattattattagattgtatatattaggattagttgttgtttgttgatggaggaataaaattgtttttttatagtgaaattttggatgaagtagggttatttagagaaatataattagtaagatatatatatatatatatatatataaatatttatttatagatatgggatttattgtaaggaattggtttataggattgtggagattgagaagttttaagtttatttagtaagttatagattaaggagagttaatggtatatttttagtttaagttcgagtttgaaggtaggagaagatcgatgttttagtttgaagagttaggtagagaaatgaatttttttttatttagtttttttgttttatttaggtttttagtgggttggatgaggtttatttatattggaaacggtaatgtattttatttagtttagtaatttaaatgttaattttatttagaaataattttgtatatatttttagtataattttttttttattgaggtaatatatttgtaaatacgtattatatcgttataaaaagaattttaggatttttttttttatgtgttttcgttttgttttttcgtggtttatgatgttagtcgaggttgttagtatagtgaaattaaattggtgggatgggagtaggttattttgttatttttttagatttttgagttgtacgttaaatttgaggttgattattttatatttgtttagtttgtttgtgaggtttataatagtttttttagttttatgattattagtggttttagatttgttagtgtaattatgttttattattatagttagaaattggacgatggggttgggtgcgatggtttatgtttgtaattttagtattttgagaggttaaggtaggtagattatttgagtatttgaggttaggagtttaagattagtttggttaatatggtaaaattttatttttattaaaaatataaaaattagcgaggtatagtggtaggcgtttgtaattttagttatttgggaggttgaggtacgagaattttttgaatttgggagggagaggttgtagtgaattgagaaatgtattagtgtattttggtttgggtgacggagttgggatttcgttttaaaaaaaaaaaaagaaaagaaaaataaaaataaaaaaaagaaaacggatagttattttggagttcggtttaataagaatttggtatttattttgttttttagttttgttgatgtttttgagagtattagttaagatatttatgtgtattattgtggtggtatggaaagagttagcgtaattttaattagatatttggacgtttaatagttcggataaattgatatataaaattaagttttatagagtgttgtggaattgtatagatggttgttattattttagagaatataaattgtttagtatttatttaaattaaaataggagtaaaattttattaaagaaagaagtttatattttgaaataaaatggataattagtattattattttttagggtaggtgatatgtatattgtagaaagattgtgagtttgaagttagataaattgaagtttgaattgcgtttttgttatttattagttttagatttggggtaagtaatttgtttgagttgtaattttgcgatttgtaaaattaaaaatatttattttgtgttggtgtttagattagagaaaaacgtattaaaaatgtttaggatgtagtagttatttaataaataaaattagttatttgaaagttgattgtgagtaatgttatataggttattttgttagaaagagttttttgtttttaagtgatgtgatatttttttattgattgatggtagttatattttgtagagttattttagtatataattatgttttggagatgtgtttataaattgtttattttagtttttttttttgtttttttgataga

SEQ ID NO: 2074 - DNA, 15046 bp, Artificial Sequence
  chemically treated genomic DNA (Homo sapiens)
tttgttaaaagaataagagagaaagttagagtgagtaatttataaatatatttttaggatatagttatatattgagatgattttataaaatgtaattattattagttaatgaaaaaatgttatattatttaaagataaaagattttttttggtaaaatggtttatgtagtattatttatagttaatttttaaatggttagttttatttattgaatagttattgtattttaaatatttttaatacgtttttttttaatttaaatattaatataaagtaggtatttttaattttatagatcgtaaaattatagtttagataagttatttgttttaaatttagagttgataagtagtagaaacgtaatttaaattttagtttgtttaattttaaatttataatttttttataatatgtatgttatttattttaaaaggtgataatgttgattatttattttgttttagaatgtgggtttttttttttaataagattttatttttgttttaatttaggtgaatattaaataatttatgttttttagggtagtgatagttatttgtataattttataatattttgtgaagtttaattttatgtattaatttgttcgggttattggacgtttagatatttggttaaaattacgttggttttttttatattattatagtggtgtatatgaatgttttggttgatgtttttaagagtattaataaagttgaaaagtaaggtaaatgttaggtttttattaggtcgagttttaaagtaattgttcgtttttttttttttatttttattttttttttttttttttttttttgagacggagttttaatttcgttatttaggttaaagtgtattggtgtattttttagtttattataattttttttttttaggtttaagagattttcgtgttttagttttttaaatagttggaattataggcgtttgttattatgtttcgttaatttttgtatttttagtagagatggggttttgttatgttggttaggttgattttgaatttttggttttaagtgtttaagtgatttgtttattttggttttttaaagtgttgagattataggtatgagttatcgtatttagttttatcgtttagtttttaattataatgatgaagtatggttatattggtaaatttgaaattattgatgattatagagttgggaaaattgttgtgaattttataggtaggttaaataagtatggaataattagttttagatttgacgtgtaatttaaagatttagaaaaatggtagaataatttgtttttattttattagtttggttttattgtattgataatttcggttggtattatagattacgaagaagtaagacgaaaatatataggaagaaaaattttgggattttttttataacgatgtaatacgtatttataaatatattgttttagtggaaaaaaaattatgttgggagtatgtgtaaggttgtttttggatgagattaatatttaaattgttagattgagtaaagtatattgtcgtttttaatgtgggtgggttttatttaatttattgaaggtttgaatagaataaaaagattgagtaagggagaatttatttttttgtttgattttttaagttgggatatcggtttttttttgtttttaaattcgaatttgaattagaaatatattattggttttttttggtttatagtttattaagtgaatttaggattttttaatttttataattttatgagttaattttttataataaattttatgtttgtgagtgagtatttgtgtgtgtgtgtgtgtgtgtgtgttttattggttatgtttttttgaataattttattttatttaaaattttattataggaaagtaattttgtttttttattaataggtaatagttaattttagtatgtgtagtttgatgatgatggaagttttgagattgtttttaatgttaagtaaattgtgagtatttaaaaatgtttgttggttaggtatagtggtttatgtttataattttaaaattttgggaggttaaggtggtagggtggtttgagtttaggagtttaagattagtttgggtaatatagggagattttgtttttataaaatataaatattaggttgggtacggtggtttacgtttgtaattttagtattttgggaggttaaggtgggtggattataaggttaggagatcgagattattttggttaatatagtgaaatttcgtttttattaaaaatataaaaaattagttaggcgtggtggcgggcgtttgtagttttagttattcgggaggttgaggtaggagaatggcgtgaatttgggaggtggagtttgtagtgagtcgaggttatattattgtattttagtttgggtaatagagtaagatttcgttttaaaaaaaaaaaaaaaaaaaaatataaatattaggtaagtatggttggtgtatgtttgtggtttagttatttgaggtaggaggattattagagtttaggaggtttaggttgtagtgagttgtaattgcgttattgttgaaaatatatattatatttataaggtatttatatttagttatatattttattaagtttttttagtggttagggaaagatgtagataattatatttgaaaataaagaataattggtgaatgataggagtatatgtgataagtattttttaaattttttaaggtatagtaattttgtggatttattttaatgcggtagttgaaaaaaatttttaattatttgttagaaaattaattatatagataaataaattaagataaaataagagttattgatattaggagtaggagaaagagataaataaaatgttgagtgattagggattttaaattataaaaatatatttttttttgtttttagtttggtatttaatagtaaggaaataatttttaatttggtaaaagttagtttggtattttgtgaatttaagaattattatggaagcgttataatattagattttttttttgatatttttgattaatttgtttttatttgtagtaatgatttaagttttaattttgagatgattaaataggattaaattttttgttaaatgttgaaaatggttgtaagtttttgtttagttattgtggtttattaaggttttggaaaatagtatatgtaatatttagttgatgagaattttttttttttttggaagttggtaatatttttacgttttttaaaatagtttttagtatcgttttatttatttttaagattatgtattggtcgggcgcggtggtttatgtttgtaataattttagtattttgggaggttgaggtgggtagattataaggttaagagatcgagattagtttggttaatatggtgaaatttagtttttattaaaaatataaaaattagttgggtatggtggtatgcgtttgtagttttagttattcgggaagttgaggtagaagaatcgtttgaatttaggaggtagagggtgtagtaagttaagattacgttatcgtattttagtttggcgatagatagagattttgtttttaaaaaataaaaaaaaaaagattatgtatttatagttatttggtttgaaggtatgatttgtgatttttgtagttttattatttattgttttttaagagaataattttagtttttaaaatattaagattataaattggtgtggtggtatatgtttgtaattttagttatttaggaggtagagggaagattatttgaatttaggagtttaaaattagtttgggtaatatagtgagtttttatttgggaagaaaaaaaaaaagaaaatattaagattgagaggtaaaatattatttagagaaaaagaaatggtttttttgggtttgtttagttattatttttgttaggtgtattttttttggtaatattttttatttttttatttggattatagataaagaatagagttatttttttataaataaaagtgtatgtatttgtttttttataagtagaagtgaattatttaggttattagtgacgaaagagttgattttaaaaaatagatttttattttttttttttcgagatggaattttgttttgtcgtttaggttggattgtagtggtatgatttgggttttttgtaattttttttttttgggtttaagcgatttttttgttttagttttttaagtagttgggattttaggtgtttgttattacgtttggttaattttttgtatttttagtagagatggggttttgttacgttggttaggttggtttcgaattgattttagttgattcgttcgtttcggttttttaaaagtgttagtattataggcgtgagttattatgtttagttatttttattttttattttaattttttgtaaggtaaattgagtggtattattaaaatttaagtttatttttaaaatttataatttattgtttaggattttgttatgtagaaatattgatatgtttatttgtttaatttgatgttttttatttattgtttgttaaggttaacgtgaatgtttgggtttaaatgttatttttgttattgtaattttttttaaaattattattttagttttttttatttataaaaatggggataatgataataattatagtatttagtgatttattatgtagagagagtatgtttgatttagaataagtgatatttaaatgttagttttaatttttattagtataatgaatgttgttagttttattatgggtaagttggtgaatttttaaaagttgtataagtttgtataatttttttggaagttaatttgatagtatttattaatttttatatgtatttttttttagattaatgagtattttttttaagaataaatttaattgaataattttttaagtataaaaaaaatataagaatatttattaaagtattatgtagtaaatagaaaagaatgatatatattatatattttatatattgagatagtttatgataggtaaaaaagtaaggtgtagaatagtatgttatgatatttgtagtttaaaagtataagtatatatggttgtatatgtatagaaatttggttttaagatatattttatattttaaatttaattaaggatatttttggagagtgaggtgtgggaaaaagtatatgataaaagtagtaggaaattttttattttggattatttaaggagttattaattatagtaatatgaaatgagaattcgtttttaatattttgttttgtttgagatgcggttttgttttgttgtttagtttggagtggagtgatacgattatggtttattgtagttttaatttttgaggtttaagtgatttttttatttaagttttttaattagttgggattataggtatttattattgagtttagttaattttttttgtttgttttttggggtttttttggtagaataagggtttttttgtgttgtttaggttgtttataaatttttggatttaagtgatttttttatttcggttttttaaagtgttggtattataggtataagttaatatgtttggtttatttttaatatttaattaatgtgtttttttgttcgtttgtttgtttgttttttgaggtagggttttattttgtcgtttaggttgtagcgtagtggtattattttaatttatcgaagtttttattttttaggtttaaatgatttttttattttagttttttaagtagttgggattataggtatgtgttattatgtttagttaattttgttgtatttttttgtagatatggggttttattatgttgtcgaggttggtttcgaatttttgagtttaggtaatttgtttgttttagttttttaaagtgttggattataggtatgagatatggcgtttagtttttattaagtattaattgttagagttaaaagggttagggaagatagaatgtattgtttttttatagaattgattttttaaaagggagttttttaggtcgggggtagtggtttaggtttgtagttttaatattttgggaggttaaggcgggaggattatttgagtttaggagtttgagattagtttgggtaatttagtgagatttttttattaaaaataaaaaattgtatttgtagttttagttatttaaaaggttgaggtaggaggagtttttgagtttaggagttcgaggttgtataagttaaggttgcgttattgtattttagtttgggtaatggagtgagattttgttttaaaaaataagggagtttttttgaatttattgtaattttgagggttgtacgattaaaaaaaatttaaaaattaattaaaaaaaattaaaaatcgttagatatagttgtttatttttgtaattttagtattttgggaagttgaggagggtaaattatttgaggttataagttcgagattagtttggttaatatggtgaaattttatttttattaaaaatataaaaaaattagtttggtatggtggcgggtgtttgtaattttagttattcgggaggttgaggtaggagaatcgtttgaatttgggaggtagatgttgtagtgagttaagatcgtgttattgtattttagtttgggtaatagagtgagattttgttttaagaaaaataaataaattaattaattaattaaaataaaataaaaaaattaaatttgttaatattttgattttggatttgtagtttttagaagagtaagaaataaatttttattttttaagttatatagtttgtggtattttgttatagtagttttagtaaattaatatagggggttttaagttaatagaagtatttttttttttttttaggatagttagagattatttttaggaattcgttgttagaaatttgggggtagatgaagttagatttttggggtttaagagaatgggttatgaggaaatagtagtggaatataagtgtgtggtgtatttaaagttttaaaggttgttttttaggatttttataatttagttttatttttttttattagtttttttagtattgttaatgattttaatagaatgttttggttggttagatttatttttttattaagtttagttagtttttgtttttataattgtgttttgattatttaatattttttatttattttttaaggtattgtttaattttttaattattttgttttatgttgatttttttttttttaattagtttttgtatttattatataatttggtttaattatttagtttaattgtttgtattatagaaggtaatatataaaagtatgagatttattatttgggttttagtttaataatattgggtattttgagaatagagattatgtgttttttcgtagttttgaagaaaagtgaatttgttagggaaaaataatgattgtggatataaaataataaaaataaagacgaattttttagatttatttttttttacggtttgtttatttgttattgaagttattagagaggtattttttgttatatgtagttgtgtatttgaagtatttaggaaagatttgtttgttatcgtgttgtaattattatttataatagtttttatggtttgtttttgttattgttaattttattatgaagaatgtaatgtttatatgatttattaaagtataattatagttagtataagttattaatttattaggtaagagatagtttagaaagtaaatttaataggatgggatataatttttagaattgtaatatttaaataatttttgaattgtagagagaatagagatttattttatagttaataaaaagggggaaaaaaaattttttgaaatttggattattttaaattgttatttgaaatagttgaatattatttaataaattataatattttgatttaaagatgtagttattgttttaaattaaattttttgatgttttgaagaaattttacggaatttgatatgtttgagggtaaggaatatttaacgataaagggtagtaagagaaaatagtttggtttataattttggaattaatttattgtagttgaagtttaaagggggtgggggaaggaaggttggtatagtggtttacgtttgtaattttagtgttttggggggttgaggtgagaggatagtttgagtttagggattcgagattagtttgggtaatatggcgaaattttgtttttataataaatataaaaattagttaggcgtggttgtttggtttgaagttttaattattcgggaggttgaggtgggaggattgtttgtgtttaggaagttaaggttatagtaagttatgatcgtattattgtattttagtttgggtatgggaaatttagtttttttatttaaaaaagaaaaaaaaaagtttgaataaattagtttaagatatgaatttaaattggaatgattagatattattattttattgtggtaatttaattatattttagtaatttatattataattgtttttggatatttattttattattatttttttaatttttaaaagtatatttaagattattttgtgttttttaatttatagtttaaaaggatttaagatatttatttgagagaattttaaaatgtttgggtgagatataaaatgatacgttattagaagttttaggggatattgggtatatgagaattaaggttggataatagtaggttatgaagaaaatataacgatttttttttgttagttttttgtatttgattttgaaggtcgttatgggtaaggtcgggttttcggtatatttgtattatgggtacgtaatagagtcgtatagtgtttagttaagcgcggatgtgttaaattaaggttgaaagaaagtttggttttgtttttaggtattagggattttttaagtttgatttttttgttattagaagtatttcgggaaggatgttcgttatattgtagattttagttaggcgcggaggtttacgtttgtaattttagtattttgggaagtcgggaggattatttaacgttaggagtttaagattagtttggttaatacggtgaaatttcgtttttattaaaaatataaataaataaataaaaaattagtcgggtatggtggcgttcgtttgtaagtttagttattcgggaggttgaggtgggaggatcgattgaattcgggaggtggaggttgtagtgagttgagatcgcgttattgtattttagtttgggtgatagaatgagatttagttttaaaaataaaaataataggggtaggatgcggtggtgtacgtttgtaattttagtattttgagaggtcgatgtaagcggattaattgaggttaggagttcgagattattttgattaatatggtgaaattttatttttattaaaaatataaaaattagtcgggcgtggtggcggacgtttgtagttttagttattcgggaggttgaggtaggaaaattgtttgaattcgggaggtggaggttgtagtgaatcgagatcgcgttattgtattttagtttgggtgataaagtaggatttcgttttaaaaaaaaaaaaataataataaaaaataataataaaatgtagatttttgagttttaaagttgattatattaattaggattttcggggttcgcgaacgtgtatttttatagttttatttttttttaattttcgtttttttttttattttttattttttttattattaggtttagcggttttaggttcgggcgtgcgtaggcgcgtttttcgttcgtcgtttattcggtcgtttcgttttttgcgtcgcgtatttgaggtagtcgttgttttttataaggcgcgcgttttcggcggggggtaagagttttttttttaggtagaggtttaggaaggttttagaattgaagtcgaagcgttggcggatgagattaatgagatttgtgacgattcggtatttgtttaagtcgattagaagttagaaggtcgtatagtgcggggtagttggcggcgggtaattaaattgaagtcgtagtttaatcgtttcggaagttgttattttgtttggtgtttaacggaagtcgagagatattacggggttatcgagaggcgtgttcgggcggttcgttttcgtcggagtttttggcgtgtgttatttagtggtgaaatttggttattataggttgcgtttaggcgagaattcggagcgtggttgattttatttaattttgtttacggtagggttgaggaagggaataagtgaaatgtttttattatatttttattgggcgttatgtagggttttttaattaaggtaattttttggataaataatatttttttttagtagtagttttttaagatatttgtttatcgacgtgaaagatttttataaaataattttaatatatttcgttgataaaattttttattatgatgagttgaaaaagatgtaagttttagtgtgtttttaatgttgaaattttgaaataatattgttaattatttttttaaatgtatttagtggaatataaatattttagttttttaatatttattattaaataaaaatgtttttgtattttttattagataaataaattagtatttatattattttttttattttttgaattagaatttatatttttttatataatatatattaatttttttaatttttataataaaagttaggaattatgaattgttatttttatttagaggatttaaaaaaaataaggtttagagagtttaagaagtaattagaggttaggagtagtggttgacgtttgtaattttagtattttgagaggttaaggtgggcggattatttgagattaggagtttgagattattttggttaaaatggtgaaattttaattttattaaaaatataaagattagtcgggtgtggtggtatgtgtttataattttagttattcgggagattgaagtagtagaatcgtttgaatttaagaggtggaggttgtagtgagttaggatcgtgttattgtattttagtttgggtaatagagtaagattttgttttaaaaaaaaaaaaaggagtaatttttttaagtttattagattagttaagttgtagatattagggagttagtagatgaattgaaaataaaattttttaattgaaagtaagggtttttggattttttttttttagagttttgttttgttatttaggttggagtgtcgtggtgtattttgtttttcgggtttaagtgattttttattttagtttttttagtagttggaattataggtgtgagttattaagtttagttaatttttgtattttttgtagagatagggtttttttatggtggttaggttggtttcgaatttttgaattttagtaatttgtttgttttggttttttaaagtggtgggattataggtatgagttattattttcgattaaaattaagtttattagagaattaaaggaataaaagaatgattattttatagatagagtagcgagtttatattataagtatatttagttaagtatatttatagttattttttgattgtatgttaaataaaggatggattatttatgagttttttgtatttttaggaaaggggtagggattttttttagaattgagggttattttttttttatattatataggataatttttgggtattttcggttgggcgtagtggtttatttttgtaattttagtttttttatattttgattattatttggtattgttattattttttagttattttggtagatgtgttgtggtatgttgtggttttatttatttgtttgtttgttttgaggttgggttttattatgtttttagtgttgaagtgtagtggcgtgattataaggtttattgtagtttttatttttgaagtttaaatgaattttttattttagttttttgagtggttgggattataggtatgtattgttatgttttgttaaattttgtaatttttgtagagacggagttttgttatattgtttagattggttttaaatttttgggtttaagttatttttttattttagttttttaaatattgggattataggtatgagttattatgtttagttttttgtggttttaatttgtattttttaatggttaataatgttgaatattttttttgtgtttatgtgtttttttagtgaaattttttttaagttttttatatttatttttattagattgttaaattttgagagttttttatgtattttagatagtagtattgaggtaggaaaataggatttggaggtagggaatataaggttaatttatattttagttgtgataggaaatattttttttatttatatagggtatacgaggagtaaatgattttttaattttattttattttttttatttatataggatatatattaagaaattagtggaaatttttggagggtatttaagtttttaaaaattttgtaatagggtttttgagtttttatgttcgggtttgtttttattttgtggagcgtatttttatttttagtaaatttttgtttttgttgttttattttttttttgttttgtttgtgcgttttgtttaattttttgtttaagatgttaagaatattttttattagtaatagtattttgttagatatgtggattgcggattattttttttgattttggagtttttttttttttttaattatttttttaatagggtttattatagattaaaagttttaaattgtgatgaagtttggtcgattaattttttttttattgttatttttgttttttaggtttaagtgatttttttgttttagttgttcgagtagttggggattataggtattcgttattacgtttggttaatttttgtatttttagtagagatagggttttattatgttagttaggttggttttgaatttttgattttcggtgatttgtttatttcggttttttaaagagttgggattataggcgggagtttttgtgtttagtttgtttgttttttgttttgttgtttaggttggagtgtagtggtaagattatagtttattgtagtttttattttttgggtttaagtaatttttttagtttagttttttaaagtagtggaattattcgtgtgagttatagtttgagttaatttttgtgtaagagttatattagcgtttatttttgtttgtttgtttgttttttgatgtttaattgttttagtattatttgttaataatattatatgttttttattttgaattttttgaatgtttgttagaaattagttgggtatatttgtgtatatttatttttggattttttgttttgttttattgatttatatgtttttttttttattaatattatatagtttttttttttttttttttttttttttttattgagagggagttttattttgttgtttagtttggagtgtagtggcgtgattttggttaattgtaatttttgttttttaggtttaagtagtttttttgttttagtttttcgagtagttgggattataggtgcgtattattacgttagattagtttttgtatttttagtagatatagggttttataggtgtatattattatgttaggttaatttttgtatttttagtagatatagggttttattatgttggttaggttggtttggaatttttgattttaagtgatttattcggttttttaaagtgttgggattatgggtttaagttatcgcgtttggtttttgtttttttttagagatagattgcgtttatagtgtagagtagtggtgtgattatagtttattgtagttttagatttttgggtttaagtgatttttttagtttagttttttaagtagttaggattattatgtttattaatttttaatttttttgtagagatagtgttggattatgttttttagattgattttaattttttggtaggtgttattacgtttggttaattttttgtatttttagtagagacggggttttattatgttggttaggttggttttgaatttttgattttaagtgattcgtttgttttggttttttaaattgttgagattataggcgtgagttattgtatttatgttttgttttaattgttttagttattttattttttttttttttttttataaattttaaaataatgttgtttgtgtatatttttaaaaaattttgttgcgatattggtagaaattgtgttatatttatatattaatttggtatgaattgatatttttaggatgttgagtttaaatttatgaatatattatgtttttttatttatttagttttttgatttcgtttattagcgttgtgtggttttaagtatataaattttatataggtgttgttagatgttcggattttaagtgttagtttttttttggtgtttagttattgcgttgattttttataggggtttgttatgtattgttttgatgaggtattttattagggtaattgtttattagggattgtttttaggatttatgttatttaagttggttggagtttttcgtagggatgttttatagggtaggtttaagttatttaagggattgttttaattgttcgttaattatttcgtttttcggttagggaattaagaaatgtagtagaataagttatatataaaattttttagatatcgagttaaagaaggaagggttttatttggttaggagtttcggtaagatttatatttttaaaaatcgagtattttgagtgagtaatttttgttttttttaagggtttataatattaagggggtttatatgagagggtcgtgattgagtaagtaggaggtatatgattgggggttgtatgtattggtaattataatggaatagaataggatagggattttttatagtgtttttttatataatgtttggaatttatagataatataatcggttaggtcgggggttaatttttaattagattcggggtacggttttgggttgtttgtttgtggattttatttttgttttttagtttttattttttttttttttggaggtagaaattgggtataagatagtatgaggggtggttttttttttta

SEQ ID NO: 2075 - DNA, 4993 bp, Artificial Sequence
  chemically treated genomic DNA (Homo sapiens)
ggtttttgggtatttaagattaagtaatgtaaaagtaaagaaaataatttttaagaagatggaaattgaattatttatagatagaagtttttttaaagttttttagaagatatttatattaaaaattgtgagaaatttgttatttttttttttttttttttagtattatgatgatatgttttttaagatttaaatttttattaagtttttttatatattgtgagtatggagttcgtgtatgtttagtattagaattatagagggtagggagtgggtaggtagaatattgaatagatttaagtgtgtattatatttgttttttagtgtgtatttgttaataatgtatttttttgggttgtttggttttaagtttagggcgtttttaaatagaggtttttttaagttggtttttataaatagataagttttatttatattaattttgtttattgttaatttgtaaagagtgttattaatgggtttagaagtagcgtatttttattaatagttaaatattttttttttatttatataatttttgttttgtaaatttttttttataaaaggataaagatagattttaatggtttaattaattaatttttaaattaatgaatttatagtattttaatataagaaataaaggtgtataattatgatagtgatttttaaaatattttatattattatatgaagaagtattttttttttaatttagaagatttttgtaggttttgtttttgtttgttttttatatttatatttatttgtgattatattaaagtagtttttatttggtagatgaaaaatttttattgtagtataaagtttataaattattaattgtttttatttagaatataattttggtatttattaataaagtttaattaggattgaggtttattttagttcgttttattattttttgtgtattgtattcgttttatggtttaagatgtgtggtttgtttttagtaatatattagtaatttagttagaaggaaggaggaaggggaagatatatttatttttttttaggattttttttggaaggtatatttatgataattatatataattggtaagaatggttgaaatggttttgtttggttgaaatgtttttattttgggttgttttatttttaggtgaagacgggaaaatagggtaagaaaggtagaatcgatatgggggataattagtagttttttttatagtttatgtttttattaattgtttttatttgatagattttattattttttattttttgtttgtttgttttttatagaaagtagtatttttttttttatttgatttttattatgaagttttgatgttaaagattgttttttttttttttttttattttatttttaaataaatttaagttatttggttttgtagagttttattaagttggtgtattggttttttttataggtgatggttgtgttgtttggttttttgtagttgttgggagtgttgtttattatttttttgagttttattaggtttatttaggttggtgtttattatgggattaagtcgttgttattttaaatttttttttagatgttattataaattttataatattagtttttgggttagtaagtattttatatgtttttggttaaagatggttttgttatgggtaaggagatgttttatttgtagtatggtaaagagtatttatatttattttaatatatgaaggaaatttaatcggcgttaagaatgggtaaggaagtcgtatttaagaaaggtaaaggtaatattatatttttaggttgttataaaataatagttttttaaatttttaaattatgggattagagggggaagataaattttagaagttttagttttagaatttgttattggtatttttaaaatgtttattgtgttttaattatatttttgaaaattttaagttttaaagatatagataagattattatttatgttttgttttattattttaattagtattagatgaaataaaatatattaaattataaatagtttatttttttattgtttatttatttaaatatttagtaattatttatagtgagtatttatttgtgttaggttttgggttagatgttgggagttaaagtagtgaaaaaaaagaaaggtgataagttagttttttgaattaagagagtaatgttgtaaggatttgttgtgttaaaagaaaagttataggaaagtattttgcgaattaagtattagataggtgtaagtgtttttaatattattttaattatatatgttaattaatagattaatagaaggaaattaagagtatagattgtatttagggatgatatttgaaaattttttttgttgtttttttggcgtatttatttagtattaataaaatgttttttagtgtgatagatatttgacgataaatttatttggtttgtttggagtttttagaaatttagtatttgttgtattagagtagtaattatttttgaggaagtggagttagttttattagtttttataatggtaggaagttttatttttggagaattattggatttggaatttagaggtttagatgtttggatgttagaaatgagagagatttagttatttgattttttagagtttatttttttttatttgtaaaataagattgttgagagaattagtgatatatatagtaagtaaagtgttgagtaaatgttaaagtattataggaaattggagttgttataattgtttatttaataaatttttagtaagaatagagtgtgttttaggttttgtgttagatattagggatttttgatttattttttttatttttttttaaataattttttaatatagtaattatataattcgttggttagaaatagtatgtttgaatagtattataattatatttatttatgtaaagaaagtatttttgatttttttttttttaggagttagtattatatttagaagattattttagatatttttttttttttttttattgaatggtttgttttgtttttggtattttttgtatttattttgatggatttttatatttcgaaatgagttttttgtttgtattttattttttgatagtagtttagtaaaaagtataatggttaggattaaggtgttattagtgatataagtattatgttaagaagatattgggattatatattttatttttttatgttatttattagttttagtagtatgggagatttagagttgtgtttatttgaaaggtatagtatgtttattataatagtacgtgttgtgtattttaataataatttgagaaacggtgatattttttatatttattttttaattttgtagtgtggttgtattatttttatttttgttgtatagataggtaagtagagatgttgatagtttaagggatttagttataattttacgttaagattagaaagataagtagagttttttgtttttaagttaagttttcgattttatttatattgtttattattttaaaatattttatttattttttttatttaaaagttagatttgtatatgagaaattatttgttaaattaatgaattaatatttgaggtttaggaaattttttgtatttttaagaaattaagtaaatttattaattttaaaggagagatgtggaaagatgttattgaattatataaaaaataattttatttttttttattttatattatattgtatttaagtataagaggaaatattttggttataaattattatatttaaaaattttgttaggtataggaagaaaaattttgtatatttttttttaaatgtggaatttaaaataatcgaatttatagaaatttagaggagaatggtggttattagaggttttggggtggggtaggagggagagaatggagagatgatgatgaaaggtttaaagttttagttaggtaggagaaataagttgttttttggatatttattgtatagaatagcgagtatagttaataataatgtattatatattttaaaattattgaaagagtaaattttaaattttttacgagataaaaataagtatttgaagtgatagatatatttagtttgatttaattattttatattgtatttatgaattatagtattattttgtattttataaataaaatataattataatttggataataattttaatattgtttaaaatatatatatatatatatatatatagatagaataaatgagatgaaaatatatatatatgttaagtggttatttttgagtagtgggtttataggtaaatttgatttttttttatatatttttgaattttttaaatttattataataaatatattataatatttttaagttttatatttggaaaaatgttttttttttattattttttagtttttttatttaattaatgttgatataagtagttttatatattagttattaaaaaaatattttaaatatataaaaaaaaattgttagtttgattttttttttttatttatttatttttttttttttggagatggagtttcgtttttttatttaggttggagtgtagtggtgtgatttcggtttattgtaatttttgtttttcgggtttaagtgatttttttgttttagttttttaagtagttgggattataggtatgtgttattatattcggttaatttttgtatttttagtagagacgcggttttattgtgttggttaagttggtttcgaatttttgattttaggtgatgtatttgtttgggttttttaaagttgtaggattataggtacgagttattatgttaggtttgatttttaaggtttagaagatgagtatattatttttagtttttttttttgataagtattaggtaaatgtgttagaattaaataatggttgttagtattttattgatgtgagagataatttattaattaatttttttttttttttttatatttttttttttttttttttttttagtaga

SEQ ID NO: 2076 - DNA, 4993 bp, Artificial Sequence
  chemically treated genomic DNA (Homo sapiens)
tttattgggaagagaagagagagaaggggtatggggggagagagagagattgattagtagattgttttttatattaatgaagtattgataattattatttagttttgatatatttgtttaatatttattaagagaaaagattaggaataatatgtttattttttagattttaaaaattaggtttggtatggtggttcgtgtttgtaattttataattttgggaggtttaggtagatgtattatttgaagttaggagttcgagattagtttggttaatatagtgaaatcgcgtttttattaaaaatataaaaattagtcgggtgtggtggtatatgtttgtagttttagttatttgggaggttgaggtaggagaattatttgaattcgggaggtagaggttgtagtgagtcgagattatattattgtattttagtttgggtgaaagagcgaaattttatttttaaaaagaaaaaaataaataaataagaaagaaaaattaagttgataatttttttttatgtatttgaggtatttttttgataattgatatgtgaagttgtttgtattaatattggttaagtaaagaagttaaaaagtaatgaagaagaaatatttttttaagtataaaatttggagatattatggtgtgtttattatagtgaatttggaagatttaaagatgtataaagaaaaattaaatttgtttataagtttattatttagagataattatttaatatgtatatatatttttattttatttgttttatttgtgtgtgtgtgtgtgtgtgtgtattttaaataatattggagttgttatttaaattatagttgtattttatttatggggtataaagtgatattatgatttatgaatataatgtggaataattaaattaagttaaatatatttattattttaaatatttatttttatttcgtgagaaatttgaaatttatttttttagtgattttgaagtgtgtaatatattattattaattatattcgttattttatgtaatagatatttaaaaaataatttattttttttgtttaattgaggttttaaattttttattattatttttttatttttttttttttgttttattttaaggtttttggtaattattatttttttttgggtttttatgagttcgattgttttagattttatatttaagagagaatatgtaggatttttttttttgtgtttggtaaagtttttaaatataataatttatggttaagatatttttttttatgtttaaatatagtatgatgtgaaataggaaagaatagagttattttttgtgtggtttaataatatttttttatattttttttttagaattagtagatttgtttaattttttgaaggtgtaggggattttttaagttttaaatattagtttattaatttaataaataattttttatatataaatttggtttttaagtaggagagatgaataagatattttagaatgataaatagtatggatgaagtcgagagtttgatttaggaataagaagttttgtttatttttttggttttggcgtgagattgtgattgggttttttaagttgttagtatttttgtttgtttatttgtatagtaagaataagaataatatagttatattataagattagagaatagatgtgaaaggtgttatcgttttttaaattgttattgaaatatatagtacgtgttgttataatgaatatgttgtgttttttagatgaatataattttggattttttatgttgttgggattaatggataatatggagaaatgaaatatatggttttaatatttttttggtataatatttatgttattagtagtattttaattttgattattgtattttttgttgagttattgttagagaataaaatataaatagagaatttatttcgagatatgaggatttattagagtaagtataagaagtgttaaaggtaaggtaagttatttaataaaggaaggaaaagaaatgtttgagataattttttaagtataatattagtttttaaagagaagaaagttaggaatattttttttatatgaatagatatgattatagtattatttaggtatgttatttttaattagcgaattgtgtagttattgtattgaggagttatttggggaagagtaggagagatgaattaggaatttttggtgtttagtatagagtttggaatatattttgtttttattgaggatttgttgaatgagtagttgtagtaattttaattttttatggtgttttagtatttatttagtattttatttattatgtatgttattgatttttttaataattttattttataaatgaagaaaaataggttttgaaaggttaaatgattaggttttttttatttttggtatttaggtatttaggtttttaagttttaaatttagtagttttttagaggtggagttttttgttattgtagggattagtgggattggttttatttttttaaaggtaattgttgttttgatgtagtaagtattaggtttttgagaattttagataaattaaatgaatttatcgttaagtgtttgttatattgaggggtattttgttggtgttaaataaatacgttaagaaagtaataggagagatttttaggtgttatttttagatgtagtttatatttttagtttttttttgttgatttattgattgatatatgtaattagagtagtattaagaatatttgtatttgtttaatatttagttcgtaaaatgtttttttgtgattttttttttaatatagtaggtttttataatattgtttttttagtttagaagattgatttgttatttttttttttttttattgttttagtttttagtatttggtttagagtttgatataaataggtgtttattatagatagttgttgaatgtttgaataaataaataataaggggatagattatttgtgatttaatatattttattttatttgatgttagttaaaataataaagtaaaatataaatggtagttttatttgtgtttttaaggtttgaagtttttaagaatatggttagaatatagtaggtattttaaaaatgttagtaataaattttaaaattaaagtttttaaaatttattttttttttttgattttataatttagagatttggaaagttgttgttttataatagtttgggagtatgatgttatttttgttttttttgggtacggtttttttgtttatttttggcgtcggttgaattttttttatatattggggtaggtgtggatattttttgttatattgtaagtggggtatttttttgtttatggtaaggttatttttggttaaaggtatgtgaggtatttgttgatttaggggttggtattgtggaatttgtggtggtatttgaggaggaatttgaggtggtagcggtttgattttatagtaggtattagtttgaatgagtttgatggaatttagggaaatggtaagtagtatttttagtagttgtagagggttaggtagtatagttattatttgtgggaggaattaatgtattaatttggtgaaattttgtaaggttaagtgatttgagtttatttagagatagaatggggaaaaaaaagggaaatagtttttaatattagaattttatgatagaagttaaatgaaaaggaaaatgttattttttatagaaaataaataaataaaaaatagagaatagtggaatttgttaaataaaggtaattggtaggaatatagattatgggagagattattggttgttttttatatcgattttgttttttttgttttgttttttcgtttttatttgggaatagagtagtttagaatgaagatattttagttaggtagggttattttagttatttttgttaattgtgtatagttgttatgggtgtattttttaggaagaattttaaaaaggagtggatatgtttttttttttttttttttttttggttggattgttgatatgttattggaaatagattatatattttggattatgaggcgaatgtagtgtatagagaatgataaaacgagttagaataaattttagttttggttaggttttgttaataagtgttaaaattatattttaaatggaaatagttgataatttataggttttatgttatagtagagattttttatttgttagatgagggttgttttgatgtagttataaataaatgtaaatgtaaagagtaaataggaataaagtttgtagaagttttttgagttgaagagaaaatgtttttttatgtgatagtatgaaatattttaaaaattattattataattatgtatttttattttttgtattaaaatattatgaatttattagtttagaaattggttaattggattattaaagtttatttttgtttttttgtgaaagaaagtttataaagtaagagttgtatgaataagagggagatgtttaattattaataagaatacgttgtttttaagtttattaatagtattttttataaattagtagtaaatagaattaatataaatggggtttatttgtttataaaaattagtttgaaaagatttttgtttggaaacgttttaggtttaaaattagatagtttagagaagtgtattgttggtaaatgtatattagagggtaagtgtgatatatatttaggtttgtttaatattttgtttgtttattttttgttttttgtagttttaatgttgggtatatacgaattttatgtttataatgtataaagggatttaatgaaaatttgaattttaagggatatgttattataatgttggagagagagagagagaagtggtaaattttttataatttttaatgtaagtattttttggaaaattttgaagaaatttttgtttgtaaataatttaatttttatttttttgagagttgttttttttgtttttgtattatttaattttggatatttaaaaatt

SEQ ID NO: 2077 - DNA, 14023 bp, Artificial Sequence
  chemically treated genomic DNA (Homo sapiens)
atttttatttttagtttgttttttattttttatagtttatattttttattttttatttttttttgttttttttaggatattgtttttttagttagttttttttttattattggttttttcgttttatttttaaaatttttgaagttaagatttgttgagttgtatgtgatagaaatttattttatattggtttagattaaaaatgaattttgttaaattatatgatagaaaagtttaagtatgtagttggtttttgttaaaataggaatagttaaagggtgtttttaggaatattttttttttttgttttgtttggttggttttattttttggaaaaaattttttaaaaattggtaaaatatttattgatgatgtaatatgtacgttttattagtttagttttttagtataaagagtttttcgtttaataagttttttaaaagtttttttaatagtttttattttttaaatagggttatatgtttttaaaggaaataataattaggagtaggatagtgaaataaatatagggtaaggtttgagttgtttgtttagttttggagatgggggtagggttggtttattttattggtttttaggtgggatgattttgtttttttaaggatatttggtagtgtttagagatatttttggttattataattgaaggacggaagggtttttagtttttagtaggtagaggttagggatattgttaaatattttttaaggtaaaagatagttttttagaataaagaattatttggtttacgatgttaataatattgaggtcgagaaattatagttttttagaattatattgaattatgggaaagaggggattttttagtggaaaaatttaggggtaaattttagaggaagggatttatttagagtaatagatatttatttttatttttatttgaaaaaaatttttttttaaattatttatgtttttcgtttaaattattttttttatattaaattttttgaaagagtggttggttttagttgttttaattattgtagttatttatttaagtgatgataattatggagttttttttatgtgttaagtattattttaggttatgggatttggtagtcgtaaattgatatgtttttatgtagtttttattttggtgggagagatatataataagtagatttttagttggtaataaaatgaaaaaatgataagtataattttttaatttatatgaaataggtaaaaaggaaaggaagttttgaattaatgtgtaattttaaatagtggttaaggaaggttttattaagaaggttttatttgagttaaataatttaaggagatgaggtagtagttatgtagagcgatatttgggtaaagagtattttaagtaaaaggaatattaaatgggaggaaaaaattgaagagaaaaatatatttgttgtatttggagaaataatttgtttgtaagttgatggtaaaaatttagtagaaagaggtgtatgatagtgttggaggaagtgagaattgttggtttttttgagtgagtgagagtaaatcgaatttagggtataagtggagagattatttttagatttagattgtgaatagtataattatattaataggagagacggaggttttatgggttaaatataagaatttgggtggagtgatggtagaaaattgtagatttatttgattgtttttatttttttaataaagaaagaaataaagttatttatagaaattaagaatgttggagaaggtgttagaaataaatgttaaaataaaaatatgaaatagttatttaggagaatgggagaataaatggattagataaataatagtgggaatgttaggtagaagtataatggtttatttgaaattatttgttattaaagtaaggttagttattgtggttatgtgttttttttagttatatttagttttataggtatgatagtaaaataatggagaattgattttaattagtaatgttgttttgtttaatggttataataatttaagagaagggtgagggagttaatagtgggtgtaagatggtgattataaagatagagtatggaatttaatttggtagtgatgaaagtgaagatataaaggaggtgagaagttgagatagatagcggtaggattaatgggttgtaggtattgagatagataaagattgttggatttagtttaacgttattagggtaaaagaaaagagttggattggtggttagagagtgggattattgaaattattgagaggttgaaagtgataagttttcgagtatgtatatgagtattagagttagaggagagtggaggataagattataggtagagaagaggttaaggtattggaaggttagggatttgaaaatattattgttgtgaatgttgaaattattaggaattgtggtagaagtaatagtggagaaggtggttatgagttaggagtttaaatttttaaggaatgagggagaaagtagatattaggagatggatattagtagaagtggtaaggagtggtattttttgatagtatgtgatgtaaaattggggaaatgagttttttttttttttttttttttaagtttattataatttggttgttatttttattattttgttgagaataatttgaaatgatgatagtaaatttttaaaagaatgttattggatgtattaaaaattgtgataagtgatatgattaaagtagatattttttttattagaattttgggaggaagtttaatggaaattaatgcgtatagaaagataaatgttgtatgttattagttatatgtggattttaaaaaatttattttatagaagtagagggtagaatattggttattagaggttggggaagggagagataatgggagatggagagagattggttaaagggtataggattatagatagataggaggaatatatttatttttgaatatttaattttttgttttaaatttgttagttttatatttatattttttattttagtaagtagtattattatttatttttaattttggggttaattttttttttttttttttttttgaattatgtttttttttaatggttaaggaaaataagtttaatataaaattagtaataataataataataataataaaattaaggtttaaagttaaaattattttaagagaaaaatttaggtaaaatagtttatttatagataggtagtatatgttagaaggataggttatttttaataaaaaagataaaatattattttttttattttttttaaatttaattatttaattatttttttttttttttttttttttgttttttttttttattatattttaagttttagggtatatgtgtataacgtgtaggtttgttatatatgtatatatgtgcgacgttggtgtgttgtatttattaattcgttttttatattaggtatattttttaatgttattttttttttttttttttattttataataggtttcggtgtgtgatgtttttttttttgtgtttatgtgtttttattgtggaagttggaaattattatttttagtaaattatcgtaagggggttaatttttgattgttttttttttattattaattttaagaaaggaagtaattaaaatttaatatatgagtaattgtttattttatttttaatatttttgttaattgtttattttatttatttagttagggtcgttattaaattttatttggatgtcggtaaaagtttttttgattggttttcgtagtttattattgttttattttaatttattttttatattatatatagatttatattttttaaatgtgtatttaattgttttttttttttaaaaaattttataatggtatgacgttttaatttagggtaaggaaattgtttttttatattttttgtatatcgtatatatcgtttgtaattgttttttaatacggagagtaggtattttattagttgatttttttatatatatttttgtaaagaggaaaagttaagtagggtgtttggaggcgagttgttattatttatcgtttttgtttggaagcgtagggttttatacgcgggatttatcggaagttcgagtattgttaatttttgttgttgtatttgggttagtaaggtgggttttgttagcgaaattcgttagaaataatgtaaatggggagtaaatatgatttcgtttatgaaggggaagttgtggttaaaagtattttgtttcggaatttcgtagttttttttatattttgggcgcggagtataatgattggttatttttattttcgttgagtttttttttttattttagtttttttcgagattaaatttggtttgtagatgtgtttggggagaatgggggttttttttttaagaagttcggagtttgtcgggtcgtcggcgttcggtttttttttttgttgcggaggatttttgttggcggttgtggtgttgtttgcgttgtcggtggtttggggtgagaggcgggcgggcgtggggaggcgttcgggcggacgaggaattcggggtttcgtagagaattcgcgtgtagcgttgagttgcgttgttttgcgcgttcgggttcgaaggtagcgcgatgggtgggttgagcgcgcgattcggtagggcggcgggtgtaggatttttttgcgtattggagattttcggtgtttttgggtaagcgtggagtttttaggtgtaggggtttaagtcgtgacgagcgtagtggaaggcgtagatgttgagcgggtgtcgtacgaaattttttgtttttgtgtatttatagtttcggttggttatagttaagacgtggcgttgattttagtgaaagggaatttggggattcgataaatttgagttttggttttagaaatttaattgtgaggtaatttagtatatttgagtttgtttgtttttttgtaaaatggggatattggtatttttgtatcgtggagttgttgttttagtggtattaagtttgtcgagtatttaatatagggttatgtgttttcgagtttatttttattttttaatcgttatttttgtatttagtttttaatggtgtttagataagtagttttagggatgtaggtgttatttgataattgtttcgtatggaattgttttcgttttttatattaagttattacggttattattattatgtatttaattgatagtatattttaagatagatgtatgttaggtatttgcggattagaagagtaagggaagttttagaatatgtaatgtaatcgttgtaggtagaagggatagtagatatgtttatagttcgtattttagtgatgtgtttagtataaaataacgtttattataattattatggaaattttgaggttatattttttttttttttttaattttaaataggtaaatatttttagttagaatttttttattattatttttcggttttttagaagtttttttggttgtttagatttattggtaatattttatttgaagtgatagttttggttgtttttgtttagtttatttttgataatttcgggttcgtttttttttgttattagatattttatatttattatttgagtgtttttttttttttaaaagagtaaataaaataaaataaagtagaattaagtttcgtaagagttgttattaatatttgatttttttaggtattagaaagtaatttgttaggtgtagagatgtgataaaacgtataattttatttttaggagagaagtatgtttagtaagttaagtaatttgttgttaacgtttaggaatttgtgttatttttgggagtattggttttttttttattagaatgttgttttatttagtttatgttgattaagttattgttataaataattttagatattattaattgtaaaaaaaaaatttattgaggttattataataatttttaaatgtgaaatagtttaaattaaattatttagaaattttgttgttgatataatttaaattttaaaatgttgatggatgtttttagtgtgtatggttttttggaattttaaagaagtataagagttttgtatttaaagtgtatgtatatagaagtaggtggtggagttttatgaaatttatttattaggaagttagcgttttgttttttttagtttttgttatttattagttggtgttttggatttagtaagttaagttatattattgatttttagtgtttatatgtataaaatgagtataattgatattttgatttttgagagagacgttttgaaaattagatggtgtaatgtatgtgatagtgttttgtaatttgaaaatttttatgtatgtttgaaaaattatgattaagaagtcgtgtaagattgtaggattatcgaaaagcgagaaattttaatttttatgattaggaaaggatgagtgaaaggtatatggttttattagtatttaaagagtgaatttagaaatagattgtatacgataaaaaatagtagaggagttaggattgttttgttattatgagttatttatagtattcgtaaagtggtatagtgttatttgaaagaggatttagattagttgtaaatagatattgtaaatgtaggataatttttgaaaaatgtgaaaaaaagaattataatttatatgttaataagtaagagagaattgtattatataaaatgtttagttaaaataataaagatggttggggatagtggtttatgtttataattttagtattttgggaggttgaggtgggtggattattttaagttaggagtttaagattagtttggttaatatagtgaaattttgtttttataaaaatataaaaattattagggtatgatggtgggtgtttgtagttttagttattcgggaggttgaggtatgagaatcgtttgaatttgggaggcggaggttgtagtgagtcgagatcgtgttattgtattttagtttgggtgatagagcgtaattttaaattaaaaaaaaaaaaaaaaaaaaaaaaaaagaaataaataaataaaataaaaaataataaagggtaggaaaagaatggaagataaaaaatagaaatagagaataagagaaaaaaagtattaaataaaaattagtaataaaattaaagtaattatattaataattattttgagtgttaatgatcgaaatgtattatttgaaatagattattagagtggattaagaaataagatttaattatatattgtgtataataagatcgttttaaatatagataatatatatgaaaagtaaatggataaagatatattatgttaatgttagttatagaaagtaggaatagttgtgttaattttaaatatagtagattttagattaagaaaaattattagggataaagagggatattatataatgataaaggggttaattatttaagaagacgtaataatattttatatgtatgtatttgatggagagataaaatacgtgaggtaaaatttatagaattgtaaggagaaatagatggatttattattatagttggagatttttatgatatttttttgatattagaaaaggtgttgaagtttttttattagaaatgggtagatttagtaggtagaaaattcgtaaggatatatttgaatttaatagtattattaatttatttgggtataattgatatatatagatgattttatttataatagtagagtatatattttttcgtttatatttatggggatagattatattttgagttataaaatagtatacgaattaagttttattaggtagtgtttaatatagggtggattttggcgtttttacgtggtttttatataggatttggtttggttatttttgttaggttaaggtgtaagatagaagggaagttttaatttgttttttgtgttttgtggtgtattttggtttatatatgtttagatgagtggatgtgtgatttatattatttattttaatttaaaataagttttatatttggataggtaatattaaaagtgttttatatagaaatgttgggtgaagattttagtaataaaattaattttagaaaataagaaaatggtagagttgataattttttttatttttttcgtaaagatatatgtatatatattttttgttagaggtattaagtagaagaaatgttgttagtttaattataattgattataattcgatgaaattaaaaaatttagaaagtattatgaagattgtcgaaataagttttatatttattattgtgaatagagagatttaatgtgattgttttttgtttcgttagatgttagttaatgattgtgttaagttatgatgattaataaagtatttaaaatatttattttatttgtgttatattttaaaaatttatattgaggtatataatttatgttcgcgtatatatataatttataaatttatatatttgaaagggtatgttttttttttaaattgatagaggtgtttaagtaaagtaagtgtaaatttattttttaaagggtaagtatgtagaatggaaagtagagtgttttttgggttgatagtttatattgtaatagatatgaaagtgatgatgtgttaattgtgtatatagtatagaatatattaatttgttttgaatggaatatttgaattaggagaatgtgaaagtgggttgagttatataagataaaattcgaaatgagataataatatatatttattagaatggttaaaatgaaaaagattgatcgagttaagtgttggcgataaggtggagtaattggaattataatatattgttatttggtaggtaaaattataatattaattttagaaaatagtttaatagatttttaaaattttagatatatatttaatattttatttttaggtttttatttaagagaaatgaaattatatgtttatataaagatttgtatatgaatttttatagtagttttgtttgtaatagttaatacgtggaaataatttaaatgttttttaataagtaaatggataaattaaattaagatatatttatgtaattgaatattatttagtaattaaaggaaataatttgtatatatgtagtaatttagatggatttttaattatgttgtgtgaaggttaaattataaaaaaaaatttgagtgattttttttatataataggatataaatgaagtgatttaggttatatgaaattttagaaagttaaattaatttgtagtaagagaaaattatttgagttattttttttatatgataggatataaacgaagtgattcgggttatatgaaattttagaaagttagattaatttgtagtaagagaaaatatattgaaggttgtttagagaaggaagtggatgtttggatggattatagaagggtatgagggaattttgtgtgggtgggatgtatgatggaaacgtttattgtttttattttggtgatggttttataacgtatatatatgttataagtaatcgaattgtatattttaaatatttattaattattgtatgtaatatattttgataaagttataaaaatttttaaaattatggtaggtttttagtttgtggattttatattaatatatttgttataggaattagttataattgagggattggtaataaaggagagaaaggaaattatattaagttttttttgttgaaggtttatatattttttttttgagttattatataattttgttttttataattatttatattatttatatattattatgtaggtaagaatattatgtaattaaggggaaggaatttttttttaagaatggtttatttaatttgttttgttattttaggttttatttttttttttcgttgtaagttttgttgtgatatttatttttttttaatatagtttttggcgttaggtattttatatggaatttttttttttgttcggtattaatggataagataaatattaaaattgtattttattttatatattaattagaggaaaggtgaatgtataatattgaaaataatagtaattgttttatttagtgttttttttttttatagtatttttaaagtgttgttatttattaaaattagttgtgaaaatttttaaaaatagatttttgggttttaatttagatttattaaattagagatttgggggatatagtttggatttttgatttttttgagttttataagtaattttttattttttgtttattgtaataaatatgtattgagtttttataattgagtgttaagtattaggattaagtattaatttagaggtataaaaaaatatattattttttgtttttaaattatgtatatttaatatttattgagagaaatagatatttttaaaagtatataaagataaaaagtataaattgtaataataaataattattgatatgaaaggaaaagtaaagtgtcggattagaaattattatagggtggggtagagggaagtagtttagattttaaatttttaagagggttagggaaggttttagatgagattgggtgtgtttagggtggtatggttataggtaggttggggaaggtttttataagaaagtgatattttagtagatgtttgaaggaagaattgaagttagagtgaagataaaattgcgttatatagaaggaatgttatagacgggaaaaatgtgtgtttttgggaaattgaaaaaggggaaagggttatattttggtgaggggattaagtggtataagatgaggtagggaatatagataagggtttttttgtttaataattgttggtttaataaagtaaatgtgtgatgatggatataggttgtttgggaaaaataagtaagaaatatgagtttttttggagtattattttttgttttagtagaaagtatagagttaggtttttaattttgattaaagttattgataatagggaaaaggtaattttaggaatttttttttttgttcggggtttcgtgggtattatgatggagtttatgagatgtagatgagaagttttaggttgaattcggggtatatttatttaggagagttgaggttattagttattgaggttatttagtgtattttcgatagtataggtttattttaagttagttttgtaaaggagtagaaaatgaatttttggaagtaaagtaagtatttttattttagcggaataatcgaatttaatttttagaagtttttttatttttttttaagggtaataatcgtaagtataatttatgaagtgttttttgtgtatgtggtagtatatattatttttgattttttttgtaaatttggtaggaaaatattattttttttatgaagatgaaattgaggtttagtaagattaagcggtttgtttaagattttatagttattaagtagaagatattgggtttaagatttaatttatgaatttaatatttttaatattatatattattttttttttgtattaattttttattgttgttgtaataaatttttataaatttagtggtttaagataatagaaatgtatttttttttagttttggaggtcgacgtttaaaatagatttatagggttgtgttttttgtggaggttttaggggagtaggggtttttttgttttttttagtttttaggggttgttttcgttttttggtttttggttttttttttttattttttaaattagtattatagtgtttttgaatattttttttttgtttttttttatttttttgttttttttttataaggatttttgtgattatatttaaggtttatttagataatttaggataatttgtttattttaagatttttaattatatttgtaaagttttttaattattataggtaataattataggttttagggattagaacgtggatatttttgagaggtttttatttagtttattatatttttttatatagatttttaaaattttagttgagtttaataagggagtttattattattagggttcggtttagtagtaagtgttttttttaagtgaaaaggtgaaagttgtttatttaataaggaaagaaaaatattgtatgttgaagttgttaagatttaaggtaagaaggaattttttatcgatgaaattgtgaagaaggaaaaataaatttgtgttagttttgttgttatattttaaattgtaaaagttataattatagtgtatgttaagtgtttagttaagaggggaaaggtattaaatttgtgggcggaagaggtgaatagaaatgtgttttaattgatagttgttaggtttggtattatttgaggttttgggtatcggttaatgttttggaatatgttttttaaagataagtgggtgattattgtatatttaaaataagtatttatatattggggagtaaattttttatgttatttgtgttttatttgttttataaataaagtaaataaagtagaattttaggtaagatttatttttagaggtagagatattttattataataaagaaggttgttttattataaaatatagtaatttaaatttttataattttaataattttaaaatatataaaataaaagatggataatttttaaaaagaaatagataaatgtataataaataaaattttttaatataatttatttagtatttagtaagataagtattttttttaaaattagtaaagtatttagaagatttgaataaatattaatagattggatttattgattttgttataagaaagaattatatatgatgataggagagaggaagttatagtataggtatttattgattaattaaattttgaagttgtgaaatgtattttattttttagtgaaagatgatataaatagtttagttgtttttaaattggtagagattttttgaatggatggatgttgattttttaaaaaggagtttatttttgaggtattttttaaagtaggggtttttaatttttgggttatagattgatattgtttagtggtttgttaggaaatgggtagaatagtaggaggtgagtagttaagtattattgtttgagttttattttttgttagattagtggtagtattagatttttataggagtagaaattttattgtgaattgtgtatatgagggatttaggttgtatgttttttatgagaatttaatgattgatgatttgagtggaatagttttattttaaaattatttttttgtattttttatttacggaaaaattgttttttataaaattagttttaggtgttaaaaagggattattgttgtaaaggaataagtttttttgttattattatttttattaagatggaattttgttttgttatttaggttggagtgtagtggtatagttttggtttattgtaatatttgttttttgggtttaagtaatttttttgttttagttttttaagtagttgtgtataggtatgtgtataggtaagtgtaattatgttttgttaattttttgtattttgggagaggtagtgttttattatgttggttagtttggttttaaatttttgattttaagtgatttatttattttggtttttgaaagtgttgaaattataggtatgagttattatttttgtattttttggttattattgaagtgtttttttttttttttgattatatttatgaagtatattggagagaaagagaaggtagaatgggaattttaatagggttacggtggtttatttttgtaattttaatattttgggaggttaaagtgggtagatgatttgaggttaggagtcgagattagtttggttaatatggtaaaattttatttttattaaaaatacgaaaattagttaggtgtggtggtgggtatttgtaattttagttatttaggaagttgaggtaaggataattgtttgaatttaagaggcggaggttgtagtgagttaagatagcgttattgtattttagtttgggtgatggagttagttttcgttttaaaaaagaaaaaaaaaagtatggtaatttttttattaattttgatgtttttatggttttgatttttagg

SEQ ID NO: 2078 - DNA, 14023 bp, Artificial Sequence
  chemically treated genomic DNA (Homo sapiens)
tttggagattaagattatagaagtattaaagttaatggagaaattattatattttttttttttttttttgagacggagattggttttattatttaggttggagtgtagtggcgttattttggtttattgtaattttcgttttttgggtttaagtaattgtttttattttagttttttgagtagttgggattataggtgtttattattatatttggttaattttcgtatttttagtagagatggggttttattatgttggttaggttggtttcgatttttgattttaggttatttatttattttggttttttaaagtgttgggattataggagtgagttatcgtgattttgttgaaatttttattttattttttttttttttttaatatattttatagatgtgattaaaaaagaaaaagaatattttaataatagttaaggggtgtaggagtggtggtttatgtttgtaattttagtatttttagaggttaaggtgggtggattatttgaggttaggagtttgagattaggttggttaatatggtgaaatattgttttttttaaaatataaaaagttagtagagtatgattgtatttgtttgtatatatgtttgtgtatagttatttgggaggttgaggtaggagaattgtttgaatttaggaggtagatgttgtagtgagttaagattgtgttattgtattttagtttgggtgatagagtaagattttattttaataaaaataataatagtaaagggatttatttttttataatagtagtttttttttagtatttgggattggttttgtggaagataattttttcgtgaatggagggtgtagggaaatggttttgagatggaattgttttatttagattattagttattagatttttatagggagtatgtaatttagattttttatatgtatagtttataatagggtttttgtttttatgagaatttaatgttgttattaatttgataggaggtggagtttaggtagtaatgtttggttgtttattttttattgttttgtttattttttaataggttattggatagtattagtttatggtttaggggttgaggatttttgttttaaaagatgttttagaaatgggtttttttttaaaaaattagtatttatttatttaaaaagtttttgttagtttgaaggtaattaagttatttatattattttttattaaaggataaggtgtattttatagttttaaaatttagttaattagtaagtgtttgtgttgtggtttttttttttttattattatgtataatttttttttgtaataaggttagtgaatttaatttgttaatatttatttaaattttttagatattttattgattttggggggagtatttgttttattagatattaaatgagttgtgttaaaaaattttatttattgtatatttgtttatttttttttaaaagttgtttattttttattttatatattttgaggttattaggattataaaaatttaaattgttatattttatggtagagtaattttttttattataataaaatatttttgtttttagaaatgaattttgtttaaaattttattttgtttattttatttgtgggataaataaaatataaataatatgggagatttattttttagtatataaatgtttattttgaatatatagtagttatttatttatttttgggggatatgttttaagatattagtcgatatttaaaattttagatagtattaaatttgatagttgttaattagaatatatttttgtttatttttttcgtttataaatttaatgtttttttttttttagttaagtatttagtatgtattgtggttgtaatttttgtagtttgaagtgtgatagtaaaattagtataaatttatttttttttttttataattttatcgatagaagatttttttttattttaggttttagtaattttaatatataatgtttttttttttttattaagtggataatttttatttttttatttaaaggaagtatttgttattaaatcggattttaatggtaatgaatttttttattaggtttagttaaaattttgagaatttatatggaaaggtgtggtaggttaagtaaggattttttagagatatttacgttttgatttttgaagtttgtgattgttatttgtaatggttaaagggttttgtagatgtgattaagaattttgagatgggtagattattttgggttatttaggtggattttaaatgtgattataagggtttttataaaagggaggtaagagggtgaaaggagatagaagaaggatatttagagatattatggtgttggtttggaaggtagaggaaggaggttaagagttaaaggacggaagtagtttttggaagttggaaagagtaagaaaatttttgtttttttggagtttttataaggaatatagttttatggatttattttagacgtcggtttttagaattggaagagaatatatttttgttgttttaagttattaagtttgtggaaatttgttatagtagtaataggaaattaatataaaaagagaatggtatatagtattaaaaatgttgggtttatagattgaattttgaatttaatgttttttatttaatggttatgaggttttaggtaaatcgtttaattttgttgagttttagttttatttttataaagggaataatatttttttattaggtttgtagggagaattaaaagtagtatatgttgttatatatatagaaggtattttataaattatatttacgattattatttttagaaaagggtaaggggatttttaagagttaaattcgattatttcgttaaagtgggagtgtttgttttgtttttaagagtttattttttgtttttttgtagaattagtttggaatgagtttatgttgtcgggaatgtattggatgattttagtgattggtgattttagtttttttgagtgaatgtgtttcggatttagtttgggattttttatttgtattttatgagttttattatagtgtttacgggatttcggatagagaggagaatttttaaggttgttttttttttgttgttaatggttttagttagaattggaagtttaattttgtgttttttattgaagtaaaggatgatgttttaagaaagtttatattttttatttattttttttagatagtttgtatttattattatatatttgttttattaagttagtagttgttaagtaaggaagtttttgtttatgttttttgttttattttgtgttatttggtttttttattaaggtgtggttttttttttttttttagttttttaaagatatatatttttttcgtttatgatattttttttatgtgacgtaattttatttttattttgattttaattttttttttaggtatttgttaaaatgttatttttttatagaagttttttttagtttgtttatggttatattattttgaatatatttaattttatttgaagttttttttgatttttttagggatttggaatttaaattatttttttttgttttattttataataatttttagttcgatattttgtttttttttttatattaataattgtttgttattataatttgtgttttttatttttgtgtgtttttagaagtatttattttttttaatagatattagatatgtataatttaaaggtaagagatgatgtgtttttttgtatttttaaattaatatttagttttggtgtttaatatttaattataagaatttaatgtatatttgttgtaatgaataaaaaatgaagaattatttataaaatttaaaaaaattaagaatttaagttatgttttttaaatttttgatttagtgggtttaggttagggtttaggagtttatttttaaaaatttttatagttgattttgatagataatagtattttgaggatattgtaaaaaaaaaaaatattgagtaaaatagttgttgttatttttagtgttatgtatttattttttttttagttgatatgtgggatgaaatataattttgatatttgttttatttattgatgtcggataaaggaagagattttatgtgaagtgtttagcgttaaaagttgtattgagagagggtaaatgttatagtaaagtttgtaacgagaggaaggaatgagatttaaagtaataaagtaaattgaatgaattatttttggaaagaagttttttttttttaattatataatatttttatttgtatagtagtatatgaatagtataggtaattataaaaagtaaagttgtataatagtttaaaaaaggaatatatgagtttttaataaagaaagtttgatgtagtttttttttttttttttattattaattttttaattgtgattagtttttatgataaatatattaatataaaatttataaattgaagatttattataattttaaaagtttttatagttttattaagatatattatatataatgattgatgagtatttgaagtgtataattcgattatttataatatatgtatgcgttgtgaaattattattaaaatgaagataataaacgtttttattatatattttatttatatagagtttttttatgtttttttgtaatttatttaaatatttatttttttttttaggtaatttttaatgtgtttttttttattatagattgatttgattttttaaaattttatataattcgaattatttcgtttatattttattatataaaggaaataatttaggtggtttttttttattatagattgatttgattttttaaaattttatataatttaaattattttatttatattttattgtataaaggaaattatttaggtttttttttatggtttagtttttatatagtataattagagatttatttaggttgttgtatgtatataaattgttttttttagttgttgggtaatatttaattgtataaatatattttaatttagtttatttatttatttgttgagggatatttggattgtttttacgtgttggttattataaataaaattgttatgaaaatttatgtataagtttttgtgtggatatatgattttattttttttgggtaaaaatttaagagtaaaatgttgagtgtgtgtttaaggttttaagaatttgttgaattattttttaaagttaatgttataattttatttgttaaatagtagtatattataattttagttattttattttatcgttaatatttggttcggttaattttttttattttagttattttagtgggtatgtattgttattttatttcgggttttgttttgtatgatttagtttatttttatatttttttggtttagatattttatttaaagtaagttgatgtattttgtgttatatgtataattaatatattattatttttatgtttgttgtaatatgagttgttaatttaaagaatattttgttttttattttgtatatttattttttaaggaatagatttgtatttgttttgtttaggtatttttattagtttaaaaaaagagtatgtttttttaaatatataaatttataaattatatatgtacgcgaatataaattatatgttttaatataaatttttgaaatgtaatatagataaaataaatattttaaatgttttgttaattattatgatttagtataattattagttaatatttaacgggataaaaaatagttatattgagtttttttgtttataatagtgaatgtaaagtttatttcgatagtttttatgatattttttaggttttttggttttatcgagttgtgattagttgtgattagattgatagtattttttttatttaatgtttttgataaaaaatgtgtatatatgtgtttttgcggagagggtgagagggattgttaattttattatttttttgttttttggagttggttttattattgggatttttatttagtatttttgtgtaggatatttttgatgttatttgtttaaatgtgaagtttattttagattaaaatagataatataaattatatatttatttatttgagtatatgtaaattaaaatatattataaagtatagaaagtaaattggaattttttttttattttgtattttaatttagtagggataattaaattagattttatatgaggattacgtgagggcgttagagtttattttatattaaatattgtttggtaaagtttaattcgtgtattattttatggtttagaatgtggtttatttttatgaatgtaagcgggagaatatgtgttttgttgttgtggatgaagttatttatatatgttagttatatttaagtggattgatggtgttgttgaatttaagtatgtttttacggattttttgtttgttgaatttgtttatttttgataaggagattttagtattttttttgatattagaaagatattatagaagtttttaattatgatagtaaatttatttatttttttttgtagttttatgggttttgttttacgtattttgtttttttattaggtgtatatatatgggatattgttacgtttttttggataattggtttttttattattatatgatgtttttttttatttttaataattttttttggtttgaagtttgttgtgtttgaaattaatatagttatttttgttttttgtgattagtattagtatggtatatttttatttatttattttttatatatattgtttatatttaaaacggttttgttgtatatagtatatagttgggttttgttttttgatttattttgatgatttgttttaaatggtgtatttcgattattgatatttaaaatgattgttgatatagttgttttagttttgttattggtttttatttggtgtttttttttttttgttttttgtttttattttttgttttttattttttttttgttttttattgttttttgttttgtttgtttgtttttttttttttttttttttttttttttttgatttggagttgcgttttgttatttaggttggagtgtaatggtacgatttcgatttattgtaattttcgttttttaggtttaagcgatttttatgttttagtttttcgagtagttgggattataggtatttattattatgttttggtaatttttgtgtttttgtagagatagggttttattatgttggttaggttggttttgaatttttgatttgaggtgatttatttattttagttttttaaagtgttgggattatgggtatgagttattgtttttagttatttttattgttttaattgagtattttatatgatgtaatttttttttatttattaatatataaattatagtttttttttttatattttttaggggttgttttatatttgtaatatttatttgtagttaatttaagtttttttttaaatagtattatattattttacgggtattgtgagtaatttataataataaaataattttagtttttttgttattttttgtcgtatgtaatttgtttttagatttattttttaagtgttagtaaagttatatattttttatttatttttttttgattataggagttgagatttttcgtttttcggtgattttgtagttttgtacgattttttagttatggttttttagatatgtatgggggtttttagattataaaatattgttatatgtattatattatttgatttttaaaacgttttttttagagattaggatgttagttatgtttattttatatatgtggatattgaaggttagtgatgtgatttaatttattgggtttaagatattagttggtaagtagtagaggttggaaaaagtagaacgttggttttttaataagtagattttataaaattttattatttatttttatatgtatatattttgggtgtagagtttttatatttttttaaaattttaaaggattatgtatattggaagtatttattagtattttaaaatttaaattatgttagtaataaaatttttaggtagtttagtttaggttgttttatatttggaagttattgtgataattttagtaaattttttttttgtaattaatagtgtttgggattgtttataatagtaatttaattaatataggttaagtaaaataatattttagtaagaagagggttagtatttttaaagatgatataaatttttaagcgttgataatagattgtttaatttattgggtatgttttttttttaaaaataagattgtacgttttattatatttttgtatttgataggttattttttggtgtttaaggagattaaatattaataataatttttgcgggatttggttttattttattttattttatttatttttttagagaagaaggaatatttaaataatgaatgtaaaatgtttagtggtagagaagggcgaattcggagttgttaggaataggttggataaaaataattaagattgttattttaaatgagatgttgttagtgagtttaggtaattaagaagatttttggggagtcgaaaaataataatagaagggttttaattgaagatgtttatttatttgaagttaagaaaaaggaagagatgtggttttaaaatttttataataattataataggcgttattttgtattaaatatattattaaaatgcgaattgtaaatatatttattgttttttttatttgtaacggttatattgtatgttttggggttttttttgtttttttaattcgtaagtgtttggtatgtatttgttttaaagtatgttgttaattaagtgtatggtgatgatggtcgtggtggtttggtgtggggggcgaggatagttttatgcggggtagttgttaggtaatatttgtatttttaggattgtttgtttaaatattattgggagttaagtatagaggtaacggttgggggatagaaatggattcggggatatatagttttgtgttagatattcgataggtttaatgttattgaggtagtaattttacgatgtagagatattagtgtttttattttatagaagagtaaatagatttaggtgtgttaagttgttttatagttaagtttttaggattagaatttaggtttgtcggatttttaagtttttttttattaggattaacgttacgttttggttatagttagtcgaggttgtgaatatataaaggtaaggaatttcgtgcggtattcgtttagtatttgcgttttttattgcgttcgttacgatttaagtttttgtatttgggaattttacgtttatttagaagtatcgagggtttttagtgcgtagaaggattttatattcgtcgttttgtcgggtcgcgcgtttagtttatttatcgcgttgttttcggattcgggcgcgtagagtagcgtagtttagcgttgtacgcgagttttttgcggggtttcgggtttttcgttcgttcgggcgtttttttacgttcgttcgttttttattttaggttatcggtagcgtaagtagtattataatcgttagtagggatttttcgtagtagaaggggagatcgggcgtcggcggttcgataggtttcgggttttttggagaagaggtttttattttttttaagtatatttataaattagatttgatttcgaagaaaattgaaataagaggaaaagtttagcgaaaataggagtgattaattattgtgtttcgcgtttagagtgtggggagggttgcggggtttcgggataaaatgtttttgattatagttttttttttatgggcgaggttatgtttattttttatttgtattgtttttaacgagtttcgttggtagagtttattttgttgatttaggtgtagtagtagagattgataatgttcgggttttcgatggatttcgcgtgtgaggttttgcgtttttagataaaggcggtggatgatggtagttcgtttttaaatattttgtttaattttttttttttgtaagaatgtgtgtgggaaggttagttaatgaaatgtttgtttttcgtgttgaagggtaattgtaggcgatgtgtacggtgtatagggaatgtgaagaaataatttttttattttgaattgagacgttatgttattgtaagattttttaaaagggagggataattagatatatatttaaaaaatgtaaatttgtgtatagtatggaaggtagattagaatagggtaataatggattgcgaagattagttaggggagtttttgtcgatatttaagtgaggtttgatggcggttttgattgggtggataaagtggataattaataaagatattggagatggaatgaatagttgtttatgtattggattttggttatttttttttttaaggttggtggtgagaagaaagtaattaagagttagtttttttgcggtagtttgttgagaatgatggtttttagtttttataatgagaatatatggatataggaagaggaatattatatatcggggtttgttgtggggtggggggaggggggagggatagtattaggagatatatttaatgtaaaggacgagttaatgggtgtagtatattaacgtcgtatatgtatatatatgtaataaatttgtacgttgtgtatatgtattttaaaatttaaagtataataaaaaaaagaaataaaaaaaagaaaaaagaaagaaataattaaataattaagtttaaaaaaggtagaaaaaataatattttattttttttattgggggtggtttgtttttttgatatgtattgtttgtttgtaggtaggttattttgtttgggttttttttttaaaataattttgattttaaattttgattttgttgttgttgttgttgttgttgttaattttatgttaaatttgttttttttaattattaaaaggagatatgatttagaaaagaaaaaaaaaaaagagttagttttaggattagaaatgaatggtggtgttatttattgaaataagaagtatggatgtaggattgatagatttagggtagagggttaagtatttaaggatgaatgtattttttttatttatttgtgattttgtgttttttaattaatttttttttattttttattgttttttttttttttagtttttggtaattagtattttattttttatttttatgagatgagttttttagagtttatatatgattaataatatatagtatttgtttttttgtgcgtattggtttttattaggtttttttttaaaattttagtggaagaaatgtttattttgattatattatttattatagtttttagtatatttagtgatatttttttaaggatttgttattattattttaagttatttttaatagagtaatgggagtagtagttagattgtagtaggtttaggaaaagagaagaggagaaggtttatttttttagttttatattatatgttattagaaggtgttattttttattatttttgttggtatttattttttagtatttatttttttttttattttttgaaagtttgagtttttggtttatggttattttttttattgttatttttgttatagtttttggtgattttaatatttatagtaatagtatttttaaatttttggttttttagtgttttgattttttttttgtttgtggttttgttttttatttttttttgattttaatgtttatgtgtatgttcggagatttgttatttttaattttttagtgattttaatgattttattttttaattattaatttaattttttttttttattttagtaacgttaaattgaatttagtaatttttgtttgttttagtgtttgtagtttattgattttatcgttatttgttttagttttttattttttttgtgtttttatttttattattattaggttaaattttatattttgtttttataattattattttgtatttattgttagtttttttattttttttttgggttattatagttattagataaaataatattattggttagaattaattttttattattttgttgttatatttgtgaaattgaatgtggttggaaaagatatatagttataatgattagttttattttagtaataaataattttaaatggattattatatttttgtttgatatttttattattgtttgtttaatttatttatttttttatttttttaaatgattattttatatttttattttgatatttatttttgatattttttttaatatttttaatttttgtgaatggttttgtttttttttttattgagaaaatagaaataattaaatagatttataattttttattattattttatttaaatttttgtatttggtttatgaaattttcgttttttttgttaatataattatattgtttatagtttaagtttaagggtgatttttttatttgtgttttagattcgatttgtttttatttatttaaggaaattagtaatttttattttttttagtattattatatatttttttttgttggatttttattattagtttgtaaataaattatttttttaagtgtagtaggtgtatttttttttttagttttttttttttatttaatattttttttgtttagaatgttttttgtttagatatcgttttgtatggttattattttatttttttgagttatttggtttaaatgagatttttttaatggagttttttttggttattatttaaaattgtatattaatttagaatttttttttttttttgtttgttttatatagattaaaaaattatatttattatttttttattttattattaattgaaaatttgtttattgtgtgttttttttattagaataaaagttgtatgagaatatgttagtttacgattgttaaattttatgatttaaaataatgtttagtatatagaaggagttttataattattattatttgaatgaatgattatagtggttgagatagttaaggttaattatttttttagaaaatttggtgtaagagaggtagtttaaacgagaaatatagatggtttgggggaagattttttttagatggaggtgaaggtggatatttgttgttttaaatgggtttttttttttgggatttgtttttagatttttttattgggaaatttttttttttttatagtttaatgtgattttggaagattatggtttttcgattttaatattattgatatcgtggattagataattttttgttttggagggttgttttttgttttggaggatgtttggtagtatttttggtttttatttattagaggttggaagttttttcgttttttagttgtagtaattaaaaatgtttttagatattgttaaatgtttttgggagggtaaaattattttatttgagaattaatgaggtagattaattttatttttatttttaaggttgggtaggtaatttaggttttgttttgtgtttattttattgttttgtttttagttattgttttttttgggggtatgtaattttatttggagaatgaaagttattgaagggatttttgaaagatttattggacgagaggttttttgtattggaaggttaagttgatgagacgtgtatgttgtattattagtaaatattttgttagtttttagggagttttttttagagaatgaagttagttaggtaaagtagaaggagaagatatttttgaaggtattttttgattatttttgttttgataaaagttagttatatgtttggatttttttgttatgtgatttagtaaaatttatttttggtttaagttagtgtgaggtggatttttgttatatgtagtttagtaggttttggttttaggagttttggaggtggaacgaaggagttaatgatgagagaggggttaattgaaggaataatgttttggaaaagatagaaagggatgaagagtgaaagatataggttgtgaaaagtggaagatagattgagggtaagggt

SEQ ID NO: 2079 - DNA, 17142 bp, Artificial Sequence
  chemically treated genomic DNA (Homo sapiens)
aaatatatttttaggttaggcgtggtgttttatatttgtaattttagtattttgggaggcggaggtaggtggattatttgagtttaggagtttaagattagtttgattaatatggtgaaattttatttttattaaaagtataaaagttagttgggtgtggtggtatatgtttgtaattttagttatttgggaggttgaggtaggagaatcgtttgaatttgggaggcggagattgtagtgagttattgtaattttagtattttgggaggttaaggtgggtggaatatttgagtttagaggtttgagattaatttgggtaatatagagagatttaatttttataaaaaaaaatttaaatatatatatttaaaaatttttaattaaaaaaatataaaataaggaaatagaggatataatatattatttataatttatattttaattaataaaggagattttttattttgtatgagtagatttgtttttttgagatggagtttcgttttgttgtttagttggagtgtaatggtgtaattttagtttattgtaatttttgttttttgggtttaagtaatttttttgttttagttttttaaatagttgggattataggtatatagtattacgttcggttaatttttatatttttagtagagatggggttttattatgttgattaggttagttttaaacgtgtagatttttataatatataaatatatatttaaatagaaataagttaggtgtagtggtttacgtttgtaattttagtattttgggaggttaaggtgggtagattatttgaggttaggttaagattagtttggttaatatggtgaaattatttttattaaaaatataaaaattagttgagtgtggtagtgggcgtttgtagttttagttatttgggaggttgaggtaggagaattgtttgaatttgggaggcggaggttgtagtaagttaaaatcgcgttattgtattgtatagtttgggtaatagagtgagattttattttaaaaaaaaaaaaaaaaattaaagtgtttttattttaaaaaagataagaaataataattagatattttttaatgtttagttgttaatatttttttgtattttagttgggttttaaaagcgagattgagatataagatttgtttttttttagtataattagatgtgtttacgtttttttggatttaaataaaatgtaaagttattttttttaaggagtatattatagataatgtgtttttttagaatgtttttttttatattagatagattggggttttttttgtttttgcgcggggggatagaattttgttttgtcgtttaggttggagtgtagtggtgcgattttagtttattgtaatttttattttttaggtttaagtgatttttttgttttagttttttaagtagttgggattataggtatttattattatattcggttaatttttgtatttttagtagagatggggttttataatgttggttagattggtttcgaatttttgatttcgggtgatttattttgtttttttaaagtgttgggattataggcgtgagttattatgtttaatttagatagattgttttataagggtttagaaagaaaggaaattatatgaatgagtatttagttttttgttttttgaagtggatgaattgttttttttggtttttaatatagtttgttaagagttgtagtacgttttaagagtatgtgtatgtagtggagttgggatggggaggatttttaagggaatttttagttgttatttatgaattatgtagagtggagaaggatatttagtttttttgtggtttttatttgtatgattattttggtggttgtaaagggcgataggtagtaggaggagatatttcgtgatattaagagttgtgtttagatatgatcgttttggtatagtttgagggttttttatagaaattggtagagatgttagatagatataagatgttagttagttttttttgcgattggtttttagaggtggaaaatggtaaagttattaggtttattttttttaggattagaggaatatgttaattatattaaagtagattagtgggtcgggtgtggtggtttacgtttgtaattttagtattttgggaggtcgaggcgggcggattatgaggttaggagattaagattattttggttaatacggtgaaattttgtttttattaagaatataaaaaattagttgggtatggtggcgggcgtttgtagttttagttgttcgggaggttgaggtaggaaaatggcgtgaatttaggaggtggagtttgtagtgagtcgagatcgtattattgtattttagtttgggtaatagtgtgagatttcgttttaaaaaaaaaaaaaaatgtagattagaacgattaaaatgattattggtgattattggtattattgttgtaatagtaaaaatatattttttttattaatgtttttgtttttttttaaaatgttttatcgttttttgattattatggtttatttttatttttattttatttatttatttatttttttaagatatagtttcgttgttatttaggttggagtgtagtggttcgatttcggtttattgtagtttttgttttttaggtttaagcgatttttttgttttagttttttgagtagttgggattataggcgtatgttattatatttggttaatttttgtatttttgtagagatagggttttattatgttggttaggatggtttcgattttttgattttatgattcgtttgttttagttttttaaagtgttgggattataggtatgagttatcgtgttcggttttattaatgttttttatttatgtatttttttttatggattttatttatttatatatggtattttatttaatatgtaataaatatttattaagtagttattgtgtgtttagtgttgggggtatagttgtgaatattattaatatggggttagatgtggtggtttatatttgtaatttcggggttttttttttttttgagatggagtttcgtttttgttgtttaggttggagtgtaatggtaagattttagtttatcgtaatttttgtttttcgggtttaaacgatttttttgttttagttttttaagtagttgggattgtagacgtgcgttattatattcggttaattttgtatttttagtagagacggggtttttttatgttggttaggttttaaatttttaattttaggtgatttgtttgtttcggttttttaaattattgggattatcggcgtgagttattatgtttagttttattttagtgttttaggaggcggaggtgggaggattatttgaggttaggagtttgtttgggtaatatagtgagagtttatttttataaaaaaatttaaaattagttaggtgtggtggtaggtgtttgtagttttagttatttaggaggttgaggtgggaggattgttttagtttaggaggtcgaggttgtaatgagttatgattgtgttattgtattgtagtttgggtgatagagtaagattttgttttttaaaagaaaaaaaaaaaaaaaaaaaaagttttggttaggcgtggtggtttatgtttgtaattttagtattttgggaggttaaggttggcggattataaggttaggagtttaagattagtttggttaatatggtgaaatttcgtgtttattaaaaatataaaaattagcggggtatggtggcgggtatttgtagttttagtaatttggggggttgagttaggaaaattgtttgaatttgggaggtagaggttgtagtgagttgtgatagtattattgtattttagttttttagtttgggcgatagagtaagattttgtttttaaaaaaaaaaaaaaaaaagaaaagtttttgttgtatagaattttttaggttatggatggggaggagggtaggggtttaggaggggagaagcggaaggaggaataaaataaagaagagataattagttggagagtgataaatattataatgatattatggaattaggtttattagattaaatattgggtatttagtttaatgtgaattttagataagtaatgtatgatttttaagtataaatatgttttatatagtatttatattagaaaattataaatttttttttaaaatttatattgatttgggtagtttgtattttatttgttaaatttggtaattttaatttgtgtgttgggtggtggtgagtgggtaattttagataggttttttttgtggaggtgatatttgagttggaatttaaatgtaaagaaggagttaattatttaggaatttagaatattttagtatagggaatagtaagtataaatgttttaaagtggaaataagtttggagtttagaggaataggaagaaggtggggtggcggagttgagtgagggtgaggagaggagggaagcggaaggtgatgagggtaggtaggttggtaggggttagattttatatggtttgtgggttgtaataagagtattaaaatttatatattaggttaggcgcggtggtttacgtttggaattttagtattttgggaggttaaggtgtgcggattatttgaggttaggagttcgagatttgtttggtcgtgtttttttttaaaatagaagttttaagaggggtaggaagttttttttcgttttagattttatgtgtacgattttggatcgattaatattgaatattttttacgtgttaagttttgatattaaaatgggttagaagttagtagtcgttcgttgaatttgtgtttttttttggaaaacgagaatcgtgaagtttgttggtatggttagagttaaagagtattgttatttgtgagattagcgtagaaatagagcggggtttcgattggtttttcgaatttgggtggggttagagtatttttggtttcgttttttgtagcgggtcgttcgtttatgcgttttggttttaggttcgttgtcgcgttattttgtcggggtttgaatgtgaggcggagcggcggtaggagcgggtagtgttagttacggttcgcggttggggttttttttttcgtttttgtatttttacgaggtgaggcgcggggcgtgtacggtttattagagtggtttttggggtttagttgaggaagggatgaggcgttttcggtattaacgagcgttagggagtgagaatcgcgtttttgggcgagagcggaatgtgggttcggggttcgggtggtgcgtttaggtaaggttttcggtttttttagggagcgtttgtcgcgtttcgcggtattttaggtttttggtttaggtgcggcgattttagggtttgtgagggttgagggtaattgaggcgcggtttaacgcgagtttgcggattgttcgtttttttttttttattacggcgttgattggttgcgtcgtcgttttttcgttcgggaaggtcgttttttattggtcgcgttcgtatgtttattttttgcgacggtggttgttagtcgcgcgagttgagtgtgcggcggcgaggtttgttcgggcggggattgcgggcgcgtggagttgcggttgtttcgcgtcgttttttgttttaattttagtgaagttttcgaatttatttttttttaatttttgtatttgtatttttgattgtaaaacgggtatcgtgattttattttgttgaattgtttgtgagaattttagtcggtatattcgggatatagaaattttttgtaacgcgggttgggggagggttttttcgttttgggagaaacgttgtgttgtggtggttcggagtatagattttggaattagatcgtttgggtttattttagacgtagtttttcgttaggggtgtaatttgaggttggttattttattttattgagtttttatttttttagttgtaaaatggggttaataatagaatttatttcggaaagtggttttgaggatgcgttgagttatttatcgtggtttataaaggttttttgggagttgacggttgtttatttattttttttatttatttttttttttagttagtgtggttttttgttttttttatattttagggttatttcgatttaaaattatttgtatatgttttttgtttgttggggaagtattaatatttttgtaaggtaggtcgttttttttaagttttttttattttaggttttttttaattaatttttttttttgtttttttttttttttttttttttttttttttttttttttttttttttttttttttttgagagagagagtttcgttttgttttttaggttggagtgtagtggcgcgatttcgatttattgtaattttcgtttttcggatttaagcgatttttttgttttagtttttcgaatagttgagattataggtttgagattatacgttattatattcggttaatttttgtatttttattagagacggggttttattatgttgattaggttgtttaattaatttgtttaggattttttttttatggttttttattaatattatttggttttagttattttatagtatttattaatatttatttattgtttatttgttattttttttaattgttagaatgtaagttgtttgagagtaaggattttgtttgttttgtttatttttttttttttggtgggtgttattttatttgtgtttgttatatggtagatgtataagtattatttttttttggaggtatagaaggggattttttagttttggattttattaattgtttttttttttattttgggtttatatagttatatttttggtttttttttgtgtgtgttttttttttttttttttttttttttgatatgtttttagaggattttaatggatttcgttttttcgtttttataattttttattttttattttttattattagtgtaagggaagtttttttttttttttgattatttttgttggttggggtttgggataggattggatggatgtaagagtagtgttttagttttggaattaatttgtttttttatttatttaataattttattgagtatttatttaatttttgggaatatagtgaaaaaataaaaatggataaggtttttttttttgaggattatgtattttcgtgggcgaaagaaaaaatattagataattttagatagtgatagaattatgtgataggtgaagaaggtttttttgaggaggtgatatttgggtagagattagttattaaaaggtgaggggtagaatattttaggtagagggaatagaaggtttaaggtttaaggataggaatcggtttggaatattgaaatatttaaggaatattttaggtttttagagtgttatatgaagaagggagaaatatttaggattcggattatagaaggttttgtaggtaatgtaaggagtttggatttgattttaagtggtatatttttatggttagaaagtagagggtaggttgaggtgttgggatatgttttttatgtgtgggtgttagatagtttttatttattggatttttttttttttttttaaatgtaaggtttcgggaatggttttttaatgtgttgaggatatatttaagaaaaaggtagatattttggattagtttatgttatagatgtttgtgagatggttttggaaaataaagtttttattttagaaatttttatttgtaattgagggtttgtgggaagatgttagatttaggtttggttatttatttaataagaagaatttggaaatttagatgtttgttataattgatttattgtgatgtttttttaagttttttaattgtgtattggtagagatttttaaagatagttacgtggagaaagaaaagtattatttttttatttaaaggtgataaaaatgaatttttatttttttttttttttttttttttggagatattattttattgtgttgtttgggttgatttgggtttagtttatttttttattttagtttttcgagtagttaggattataggcgtgtattattatatttaattaatttttattttttttttgtagagatggtattatgttgtttaggttggttttaaatttttggatttaattaatttgtttattttggttttttaaagagttgggattataggtatgagttattttatttggttaaaatgaatgttttgtttttagtttgagttatttttagattagtaatattttttgtatttatatattgttaatattttagagtgttaaagtatttttatttgtggttgtataagataattagagtttgattttgttgataattatgaatatttgtaaaatgttttttaaaagtttttgattttttttatttttttaaattaaggataagtttagaattcggttttatagattatatttgtaaggcgatataaaaaggatttgttgataaatagttttttaaagaatatttttaaagaataaattttggaaggttaaggtgggcggattatttgagtttaggagttttagattagtttgggtaatattggaattatgtttatagaaataatataaaaattagttaggtgtggtggtgtgtgtttgtagttttagttatttgggaggttgaagtaggaggatggtttgagtttaggaggtagaggttttagtgggttagaattatattattgtatttttttagtttaggtaatagatttagattttgttttaaaaaagagtattaagattttgggatttatgtagtattttaattttgagggattataatatgtatatttatataattttttatttttttttaaatttaaaaatagttttattttagtattttaatttaattattttaggttttattttattatgtggttttatttatttatttttattttattttattttattttattttatttttggagatagggttttatttagttatttatattggattgtagtggtaagattttagtttattgtagtttagatttttcgggtttaagtaatttttttgttttaatttttttagtagttaggattataggagggtattattaagtttagttaatttttttttttttttttttttttttttgagatgggagttttatttttgttgtttaggttagagttagagtgtaatggtgtagttttggtttattgaaatttttgtttttcgggtttaagtaatttttttgttttagttttttgagtagttgggattataggcgtatgttattacgttcggttaatttttttttttttgtatttttagtagagacggggttttattatattggttaggttggtttcgaatttttgattttagatgattcgtttgtttcggttttttaaagtgttgggattatagacgtaagttatcgcgttcggtttgagtttagttaatttttaaaattttttgtagagataggattttattattgttgttaagtttggttttgaacggtttttggggttaagtgatcgttttatttttattttttaaagtgttgggattatagaagtgagttattttgtttagtttgttgtggttttagaatttagaaggttgtgtttatttttttttgtttgatatagttaattaattaaaataaagatgaagaataatatttttgatggaaatattaaaggtatttagttttttaaaatagtataataaatatataacgggtgtttattattattgtaaggttttagggagagagtagtgaataaagtataaagtttttattattagtggagtttataatttagtgaagagagaagtatagtaaatgataaaagaaattaatatgtttgataaaatgtatttggaaaatagtagagtaagggtatggagagtaattgaggtgaatgtttttttagataggatggtgtagtaaggtatttttgaaaaaaagatgatatttgaaaagagtttttttaggtcgggtacggtggtttatgtttgtaattttagtattttgggaggttgaggcggtagattatttgaggttaagagtttgagattagtttggttaatacggtgaaatcgtatttttattgtatataaaatttagtcgggcgtggtggtacgtatttgtagttttagttatttgggaggttgaggtaggagaattgtttgaatttgggaggcggggattgcggtgagttgagattacgttattgtattttagtttgggtgatagagtaaagatttttgtttttaaaaaaaataagagttttgaatgagaatgaagtgggtagtgtaaattttgtagtttttcgtgtgtagagttttgtaggtagaaggaatggtaagtatagaattttgaaataaaagtaaaattattggtatgtttgaataggtaatataggataaattttatttttttttagagatagagttttattttgttgtttagattggaatgtaatggtatgattatagtttattgtagttttaaaattttgagtttaattagtttttttgttttagtttttagagtagttgagattataagtgttcgttattatgtttggttaatttttatttattgtagagatagggttttattatgttgtttacgttggttttgaaattttagttttaagtgattttttcgtttcggttttttaaagcgttgggattataggtatgagttattttgttaggttagaataaatttaaaaatttatttttttgaagtatttttgaataaataaatttaattgtggtagttaagttggttatttgtttatttgatatttatgtaattgagtttttatattatgttggggttgttaatgattgatttgaagggatagtttttagttttgattggaaatttatgttttgttgggtgattgatatgttgtgatttattttttagtttatataataaatgtttattaaatatgtattgtgtgttaggtaatgttgaaggttttgagtatatagacgaaagtttttgtttttaggagtttgtagtttagtgtgtgtatgagacgataaagaagtttattttaaatgagggtaattgttaatatagtaaaataaggatgatgtagatggtaatcgtagaaggtttttttgaagagttgatagtgggttgagtgttgaatggtgtttattattaaattagaggatgagtattattatggttagggagaatttttgtggttagtttgtagaatagaaggtttttgtgtttggaatgtagtaagagttaggaggaggtaggagatgaggttagtagatattagattgtttagattttgttgtggtaagggatttggtggtggtggtggtggtggtggttgttttggagatagggttttatttttattgtttagtttgtagtgtagtggtttgattataatttatagtagttttaatttgttggatttataggtgtgtgttattatatttggttaattttttgtatatttagtagagatagggttttgttgtgttagtttaggttggtttgaagtcggttgaagtaatttatttgttttggttttttaaaatgttgggttaataggcggtagttattgtatttggttaggagtttgggtgtttaagataagtaattatgaggaatttaaggagttttagttgagaaatatataaatgttagagaaatataatgaagaaagtgaaatgtagatttattaagaagtgtatttttaaaaattaagaaaataagttttgtgtggtggtatatgtttgtagttttagttattttagaggttgaggtaggaggattgtttgagtttaggagttagaatttaatttggataatatagtgagattttttgttttttttttttttttttttttttttttttaaagataaaatagatttgtaaatttgtttttgtattttttttatttaagtttttaataatttgttttgtatgaatttttaaaggtagaataaatttgtatatggtaaagaaaggttaattttttttaatttagatatattgatgttaatgatttaatttgattatagtaaattaatttttttttttttttttttttttttttttgagattgcgttttttttttgttgtttaggttggagtgtaatggcgtaatttcgttttattgtaatttttgttttttaggtttaagtaatttttttgttttagttttttaagtagttgggattataggtatgtgttattaggtatggttaatttttagtagagacggggttttattatgttggttaggttggttttaaatttttgattttaggtgatttgttttttttagttttttagagtgttgggattataggtgtgagttattatatttggtttaaatttttatgattttataattgatttattattttaatatagaaaaaaggaataggaaaataaatggattaaattattgttttttaaagtgtgttttattgaaaaggagttttatagttaaataatgggagagattgggtaatttttttattttagttttttaagtagttaggattatagggttatattattacgttcggttaattttttgtatttttagtagagatggggttttgttatgttgtttaggtaggttttgaatttttgggtttaagcgatcgtttgttttagttttttattagtggagattttggattaattgatgtgaattagtaattttgtgagtttaaagtgttttgtattgtgaatttttaaagtggggtaggatataatgtgtagtattttttaaatttgtgatataaaaaattataaagggtatagttttttaatagattgtatgtgtggtttaatgggatttgatttttatatttatagagtggaatatttggattagagggagtgattaggtaggtggtgggatttatttagttagaatattagttttttgtgataaatatattttttaattaaggggaaggattgtagtatgtagaatatagataattttttttagaaggttggggtttttggttgttggggagtgttttgtataagtatagtattagataatatttttttattttttggttttttatcgtttagttgttttttggttgttttttttttatattagtttttttattgtgttgtgagtgtttttatttttggttagtcgtttgttatttttatttaagaggtagttttgggtaatagaaagagggtagatttacggagttggattgatttaaatttgatttttatttattaattatatatagttaatatatgttaatttgagtgtttttttttgtgtgtaaaattattgtgtggaataaatgatatgaagtttatgaaaatatttagtatcgtgtgtttggtttatatatgtgatattttttttattttgtaaattattattagtttaaaggttttttattttatttttattatatttttatttatttaagaaaatttttatgatttttttatatattaaattatggtattttttagttaagtatggaggaatttatatgatttggttttgattttttagtttattattttttttttttatttttgttattttgtttttataatttattttggtagatgcgtttttattttattttgtttatttagatatatatattttttaaggtttagtttaaggtttaggttttgggaaatttttggatggttatataatttcgtgattttttttttaattttttaacgtttaaggtgttgtttttgtgatttatttggtattttagaggatagatgttttagaatttgggattttttttggatgtatgtattgtggattatataatatttttagtggggtttggggtagtattttgtaattaaacgtattgatatttttttagtgaaataaatttgtatattaagtgagataaatttatgttgatagttttaggtagtttaggttggttttgttgttaagtgagtttgttataaatttgttaaaaaataaatttttaagtttttttatttttggattttattattttagtaaagggtatataggtttgtatttggtattttagttgtgttttgttttttgaattattatagaagttttttttaggataggaatttgattgtatattgttataggtattttaaaaataaatgggtttcggtatggtgggttatgtttgtaattttagtgttttgggatgtcgaggtaggaaaattgtttgaggttaggagtttaagattagtttgcgtaatatggtgaaattttatttttataaaaaatataaaaattagttaggtatggttgattgcgtttgtagttttagttatttaagaggttgaggtgggaggttggggtttgagttttggaggttgaggttgtggtgagttatgattatgtttttgtagtttaatttgggttatagagtaagattttgtttgaaaaaataataaaattttttaaattttttattgtaaatgtataatagatatgtgattgtaagattagaaaagtatgaagagaataaaattttttttatatttattatcgagatgttattattgttttatattttggagtgtgttttttgtttttttttatatgtgaagtttttttttataatttgaattatgatatttttgaattttttttattgattttttttatattttataaaaattgtgtgtttagtttttttttttttttttatagaagtttttggttaatttggtgtatgatttttttgaaagggttttatttttttatttatatgtggttatatatttaaaagttgtttaatggaatttaagtataagtggagttttttaaaatcgttttttttttttttggagataaagtttcgttttttttgaggttggagtgtagtggtataattttggtttattgtagtttttgtttttaggtttaagcgatttttttgttttagttatttaagtaattgggattataggtgtatgttattatgttcggttgattttgtatttttagtagagacgggatttattatgttggttaggttggttttaaatttttgattttaggtgatttattttttttagttttttaaagtgttgggattataggcgtgagtaatcgcgtttagtttaaaatagttttattgaagtataatttatatattataagatttatttattttaagtgaattgtttgggaaatgttagtaaatttatgtagattatgtatgtgttattatagtttaattttagaatattttgttatttttaaaaagtttttttagtttgtatttaattttatcgttttattaataagttggagattataaagtttaattgataagatttttaggatttgtgatttgttggtaattatgtatatttgatatttgtattttgtgtatgtgttgtttttgtgtgtttttttattttttttttaattgagtgggtttagattttttttttttttatttttaatggataaaattgtatatatttgtggtatgtatgttttgaaatatgtatatattgtataatggttaaattaagttaattaatatattattttatatgttgtgtgtgtgtgtgtgtgtgtgtgtgtgtgtgtgtgtgtggtgaaagtatttaaaatatatttagtaatttttaagtgtataatatattattatagttattttgttgtataataaattttttgaattgtgtattttttagtttatgttgttagtagttaaatcgacgtaggttatttagttagtttaaaatttgtgggttgggtacggtggtttacgtttgtaattttagtatattgggaggttaaggtaggaggattatttgagtttaggagtttgagattagtttgggtaatattgtgagattttgtttttataaaattttttttttaatttgttatttgttagatgtgaagttttttggttagttataagtatattatgtgatttagttttgtttaagttttaaatatgaaaatttttagaattataattttagttgttattttttgaattttagaatttatttttttagatgtaaatttttagtattttgtagtatttgcgattatatgttgtatatgaaggaattttttgtttttttaattttagaattttatgtgggatatttatttgttgtttaaaattttaatttttcgttgtggggttttttttttttttttttttaagataggttttgttttattatttaagttggagtgtagtggtattattttagtttattgtaatttttgtttttaggtttaagatatttttttattttagtttttcgagtagttgggattgaaggtatttattattatgtttggttaattttttgggttggttggttggtttgttttgagacggagttttgtttttatcgtttaggttgtagtgttatggtgcgattttagtttattgaaatttttgtttttcgggtttaagcgatttttttgttttagttttttaagtagttgagattataggtttttgttattatgtttagttaatttttgtatttttagtagagacgggattttattatgttgattaggttggttttaaatttttgattttaggtgattcgtttgttttagttttttaaagtgttgggattataggtatgagttattatgttcggttttaatttttttgtagttttggtagagatggggttttattttgttgataggttggttttttaatttttgagtttaagtagtttatttattttagttttttaaagtgtcgggatttataggtttgagttattgttcgggttttttatggggtttttttaataagtttttttagtgatttttttttttttaatttttattagtttttttttatagtattaaattatataaattttttggtgatttcgagtagttttttagtttttttttttatgattatttttttgaaattttgggatttttttttattttttttattataaaattgttttattattgtttttgggggaaaaggtatattttatttgttggatttttgttttagagttaggtttattgtttatataaaaaataatagatggatgatttttagagagaataatttataatataaacggatttttttaaatgtaaattatttttttcgtaagtgattagttatttaaattttattttatattttaga

SEQ ID NO: 2080 - DNA, 17142 bp, Artificial Sequence
  chemically treated genomic DNA (Homo sapiens)
tttaaaatataaaataaggtttggataattggttatttacggaaaaagtgatttatatttaaagaaattcgtttatattatgggttattttttttgaaagttatttatttgttgttttttatatgggtagtaaatttgattttgagataagagtttagtaaatgagatgtgtttttttttttaaaaataatagtgagataattttgtgataagggagatgaaaaaaaattttaaaattttaaaaagatagttatagaaaaaaaagttgaaggattgttcgaagttattaagaagtttatatgatttaatgttatgggaaagggttaataaaggttaagaaaaaaaaaattattggaggaatttattaaagaagttttataaggagttcgggtagtggtttaggtttgtaaatttcgatattttgggaggttgaggtgggtggattgtttgagtttaggagttaagagattagtttgttaatagggtgagattttatttttattaaaattataaaaaaattgaagtcgggtatggtggtttatgtttgtaattttagtattttgggaggttgaggtaggcggattatttgaggttaagaatttgagattagtttggttaatatggtaaaatttcgtttttattaaaaatataaaaattagttggatatggtggtaggagtttgtaattttagttatttgggaggttgaggtaggagaatcgtttgaattcgggaggtaaaggttttagtgagttgagatcgtattatagtattgtagtttgggcgataagagtaaaatttcgttttaaaataaattaattaattaatttaaaaaattagttaggtatggtagtgggtgtttttagttttagttattcggaaggttgaggtgggaagatgttttgagtttgggggtagaggttgtagtgagttgagatggtgttattgtattttaatttgggtgatggagtaagatttgttttaaaaaaaaaaaaaaaaaaggttttataacgagaaattaaaattttaaatagtaaataaatattttatataaagttttgagattaaagaaataagaaatttttttatgtataatatgtaatcgtaaatattataaagtgttaagaatttgtatttagggagataaattttagagtttagaagatgatagttaagattatgattttagaagtttttatatttaaagtttaaataaaattaaattatataatatgtttataattgattaaaaaattttatatttaatagatgataaattaaaaaaaaaattttgtagagatagggttttataatgttgtttaagttggttttaaatttttggatttaagtgatttttttgttttggttttttagtgtgttaggattataggcgtgagttatcgtgtttagtttataaattttaagttaattaaatggtttacgtcgatttaattattaataatataggttaagaaatatatagtttaagagatttattgtataataaggtgattataataatgtattgtatatttgaaaattattgggtatattttaagtgtttttattatatatatatatatatatatatatatatatatatatatagtatgtgaagtaatatgttaattagtttgatttagttattatataatgtatatatattttaaaatatgtatattataaatatatataattttgtttattaaaaatgggaaaaaaaggagtttgaatttatttaattaaaaggaaaatgaaaaaatatatagaaatagtatatatatagagtataagtgttagatgtgtatgattattaatagattataaattttgggaattttattaattgagttttatggtttttaatttgttggtgagacgataaaattaggtgtaaattgagggaattttttgggggtgatagagtgttttaaaattggattgtggtgatatatgtataatttatataaatttattaatattttttaaatagtttatttaaaatggataaattttatagtatgtaaattgtattttaataaagttattttaggttgggcgcggttgtttacgtttgtaattttagtattttgggaggttgaggggggtggattatttgaggttaggagtttgagattagtttggttagtatggtgaatttcgtttttattaaaaatataaaattagtcgggtatggtggtatgtatttgtaattttagttatttgggtggttgaggtaggagaatcgtttgaatttggaggtagaagttgtagtgaattaagattgtgttattgtattttagttttagaaagagcgagattttgtttttaaaaaaaaaaaaagcgattttagaaaattttatttatgtttagattttattaggtagtttttagatatatagttatatgtagatgggaaagtggagtttttttagggaaattatgtattaaattaattagaggtttttatgaaaaagaagaaaaaaattaaatatataatttttgtaaaatgtaaaaaaggttagtggaaaaagtttaaggatattataatttaaattatgaaaaaaaattttatatatagaagaaaataaaaaatatattttaaaatgtagaatagtgataatatttcggtgatagatataaggagagttttattttttttatatttttttaattttataattatatatttattatatatttatagtaaggaatttaaaaaattttattatttttttagatagagttttgttttgtggtttaggttggattgtaggggtatgattatagtttattatagttttaatttttagggtttaagttttaattttttattttagttttttgagtagttgggattataggcgtaattaattatgtttggttaatttttgtattttttgtagagatggggttttattatattgcgtaggttggttttgaatttttgattttaagtaatttttttgtttcggtattttaaaatattgggattataggtatgatttattatatcgggatttatttatttttaaaatgtttatgataatatgtaattaagtttttgttttagaaggagtttttgtaatagtttagaagataagatataattgaaatgttaagtataggtttatatattttttattaaagtgatgaaatttaaaaataaaaaaatttaaaagtttgttttttaataagtttgtggtaaatttatttggtagtaaaattagtttgaattgtttgaggttattaatatagatttattttatttagtatgtaaatttgttttattaaagaaatattaatacgtttgattatagggtgttattttaagttttattggggatgttgtataatttatagtatatgtatttaaaaaaaattttaaattttgaaatatttgttttttgaagtgttaaatgaattataaagatagtattttaaacgttagaaaattaagaagggagttacggggttatgtggttatttaagagttttttagagtttgagttttgagttgaattttgaaaaatatgtgtatttgaataggtaaagtaggatgagggcgtatttgttaaaatgaattgtgagagtaaagtaatagagatgggaagagagaatagtgggttaggagattaagattagattatataggtttttttatatttggttgaagagtgttatgatttaatgtatggggaagttatgaaggtttttttaagtgggtaaaaatgtaatgaaagtggagtagaggatttttgggttggtaatggtttgtagaatgggggaagtgttatatgtatgaattaggtatacgatgttagatgtttttataggttttatattatttattttatataatgattttatatataaagaagggtatttaggttgatatatattaattatatatggttaataaataaagattagatttaaattagtttaatttcgtaggtttattttttttttattatttaaggttgttttttaggtggaaatgatagacggttgattaagagtgaaagtatttataatataatagaaaggttgatgtgaaaagagggtagttagaggataattgagcggtggggagttagaaaataagaaaatattatttaatgttgtgtttatgtagggtattttttaatagttagaaattttaattttttaaagagaattatttgtattttatatgttgtagtttttttttttaattagaaaatgtgtttattataggaagttaatgttttgattgagtagattttattatttatttaattattttttttaatttaggtgttttattttataggtgtgaaaattaagttttattaaattatatatataatttattgagaggttatattttttatggttttttatattataagtttggaaaatgttatatattatattttgttttattttggagatttataatataaagtattttaaatttataaagttattggtttatattaattaatttagagtttttattggtgggaggttgaggtagacgatcgtttgagtttaggagtttaagatttgtttgggtaatatggtaaaattttatttttattaaaaatataaaaaattagtcgggcgtggtggtgtggttttgtagttttagttatttgggaggttaaggtgggaggattgtttagttttttttattatttggttatagaatttttttttaatagaatatattttggaaagtaatgatttaatttatttatttttttattttttttttttgtattgaaatggtggattagttatgaaattatgaaagtttgggttaggtgtggtggtttatatttataattttagtattttgggaggttgagaggggtagattatttgaggttaagagtttgagattagtttggttaatatggtgaaatttcgtttttattaaaaattagttatgtttggtagtatatgtttgtaattttagttatttgggaggttgaggtaggagaattgtttgaatttgggaggtaaaggttgtaatgaggcgagattgcgttattgtattttagtttgggtaataagagagaaacgtagttttaaaaaaaaaaaaaaaaaaaaaaaaaaaagttagtttgttgtggttaagttaaattattaatattagtgtatttgagttaaaggaaattggtttttttttgttatatgtaaatttattttatttttggggatttatgtaaggtagattgttagaaatttgggtggggagggtgtaggggtagatttatagatttattttgtttttaaaaaaaaaaaaaaaaaaaaaaaagagagatagggggttttattgtattgtttagattggattttaatttttgagtttaaataatttttttgttttagtttttggaatagttgggattataggtatatgttattatatagggtttatttttttgatttttaaaaatatattttttaataaatttgtattttattttttttattatgtttttttagtatttgtatattttttaattaaaattttttagattttttataattatttgttttaaatatttaaatttttggttaggtgtagtggttgtcgtttgttagtttagtattttgggaggttaaggtaggtggattgttttagtcggttttagattagtttgggttaatatagtaagattttgtttttattaaatatataaaaaattagttaggtgtggtggtatatatttgtagatttagtaaattgagattgttgtgagttgtgattaggttattgtattatagattgggtaatgggagtgagattttatttttaaaataattattattattattattattattaaattttttattatagtagggtttaagtaatttggtatttattgattttattttttatttttttttggtttttgttatattttaggtataaaagttttttgttttataaattggttataagagttttttttgattataataatgtttattttttaatttgataatggatattatttagtatttagtttattgttaattttttaaaaaggttttttacgattattatttatattatttttgttttattgtgttagtaattatttttatttgaaataaatttttttgtcgttttatatatatattagattgtaagtttttgagggtagggattttcgtttgtatgtttaggatttttagtattatttggtatatagtatatatttagtaagtatttgttgtatgaattaaaggataagttataatatgttagttatttagtaaaatatgagtttttagttaagattggagattatttttttagattaattattagtagttttaatataatgtgggaatttagttgtatgaatgttagatgaataaatgattaatttaattgttataattaaatttgtttatttaaaagtattttaagaaagtgaatttttagatttgttttggtttggtagaatggtttatgtttgtaattttagcgttttggaaggtcgaggcggaaggattatttgaggttaggattttaagattagcgtgggtaatatagtgagattttgtttttataataaataaaaattagttaggtatggtggcgagtatttgtagttttagttgttttggaggttgaggtagaaggattggttaagtttagaattttaaggttgtagtgagttatgattatgttattgtattttaatttgggtaatagagtaagattttgtttttgaaaaaagataaaatttattttgtattatttgtttaaatatgttagtgattttatttttgttttagggttttgtatttattattttttttgtttgtagagttttgtatacggaaagttataaggtttgtattgtttattttatttttatttaggatttttgttttttttggagataggggtttttgttttgttatttaggttggagtgtagtggcgtgattttagtttatcgtagttttcgttttttaggtttaagtaatttttttgttttaattttttaagtagttgggattataggtgcgtgttattacgttcggttgagttttatatatagtaaagatgcggttttatcgtgttggttaggttaattttaaatttttgattttaggtgatttgtcgttttagttttttaaagtgttgggattataggtatgagttatcgtgttcggtttggaaggattttttttaaatgttattttttttttagagatgttttgttgtattattttatttaaaagagtatttattttagttattttttatgtttttattttattattttttaagtatattttattaggtatattaattttttttgttatttattgtgtttttttttttattagattgtaaattttattgatagtagggattttgtgttttgtttattgttttttttttagagttttataatagtgatgagtattcgttatatatttgttgtattattttaaaaagttagatatttttgatgtttttattaaaaatattattttttatttttattttggttggttgattgtgttaaatagaaagaggtggatataattttttagattttaaaattataataggttgagtaaggtggtttatttttgtaattttagtattttgggaggtggagatgggacgattatttgattttaaggatcgtttaagattagatttggtaataatagtgagattttgtttttataaaaaattttaaaaattagttgggtttaggtcgggcgcggtggtttacgtttgtaattttagtattttgggaggtcgaagtaggcggattatttgaggttaggagttcgagattagtttgattaatgtgatgaaatttcgtttttattaaaaatataaaaaaaaaaaaattagtcgggcgtggtggtatgcgtttgtaattttagttatttaggaggttgagataggagaattgtttgaattcgggaggtagaggttttaatgagttaagattgtattattgtattttagttttagtttgggtaataaaagtgaaatttttattttaaaaaaaaaaaaaaaaaaaaaaaaaaattagttgggtttggtgatatttttttgtggttttagttattagggaagttgaggtaggaggattgtttgagttcgggaggtttaggttgtaataagttgaggttttgttattgtagtttagtatgggtgattgagtgaaattttgtttttaaaaataaaataaaataaaataaaataaaataaaaataaataaataaaattatataatagaatgaaatttaaaatgattaagttgagatgttagggtaggattatttttaagtttaaaaaaaagtgaggggttatataaatatgtatgttataattttttaaagttaaaatattatatagattttagaattttaatatttttttttgagatagggtttgggtttgttatttaggttggagaaatgtagtggtgtaattttggtttattgaaatttttgttttttgggtttaagttatttttttattttaattttttaagtagttgggattataggtatatattattatatttggttaatttttgtgttgtttttgtagatatggttttagtgttgtttaggttggtttggaatttttgagtttaagtgattcgtttattttggttttttaaagtttattttttgggaatattttttaaggaattatttgttaataaattttttttatatcgttttgtagatatagtttataaaatcgaattttaagtttatttttaatttgagaaaataagagaaattagggatttttagagaatattttataggtatttataattattaataagattaagttttaattattttatgtaattataagtaaaggtattttgatattttgaaatattagtaatatataaatgtaaaaagtgttattgatttaaaaatgatttaaattagaaataaaatatttattttggttaagtagggtggtttatgtttgtaattttagttttttggggggttaaggtaagtagattggttgagtttaggagtttgagattaatttgggtaatatggtgttatttttataaaaaaaaaataaaaattagttgagtgtggtggtgtacgtttgtagttttagttattcgggaggttgaggtaggaggatagattgagtttaggttagtttaggtaatatagtgagatggtgtttttaaaaaaaaaagggagggagaagataagaatttatttttattatttttaaatgagggggtgatatttttttttttttacgtaattatttttggaaatttttattaatatataattaagaaatttaaaaaagtattataataaattagttatggtagatatttaaatttttaagttttttttgttgaatgaatggttagatttaagtttagtatttttttataggtttttaattataggtggagatttttggaataaaagttttgttttttaaagttattttatagatatttgtgatataagttgatttaagatgtttgttttttttttagatatgtttttaatatattagagaattattttcgaggttttatatttgggaagagggaaagagatttaatgaatgaaaattatttggtatttatatatgaagaatatattttaatattttaatttattttttgttttttaattataggaatatattatttagaattaaatttaaattttttatattgtttataaagttttttatgattcgggttttggatattttttttttttttatgtaatattttaggaatttaagatattttttaaatattttaatattttaagtcggtttttgtttttgagttttgagttttttattttttttatttggaatgttttgttttttattttttaatggttggtttttatttaaatgttatttttttagaaaagttttttttatttgttatataattttgttattatttgaaattatttaatgttttttttttcgtttacgagaatatatggtttttaagggaagggattttgtttatttttgtttttttattatatttttagagattaagtggatgtttaataaagttattaaatgaataaagaaataaattaattttaaaattagagtattgtttttgtatttatttaattttgttttagattttaattagtagaagtaattagaaggggagagagattttttttgtattgatggtaagaagtgaaagataaagggttgtaggagcggagagacgaggtttattaggattttttgaaagtatgttaaaaaaaaaaaaaaaaaagagagagatatatatagagaaaggttaaagatatgattatgtgggtttaaggtgagaaaaagagtaattggtggaatttaagattaaagggtttttttttgtgtttttaaggaagaataatatttgtgtatttattatgtggtaagtataggtgggatggtatttattagggagagagaagtaagtaagatagataaggtttttgtttttaaatagtttatattttagtagttgagaaagataataagtaagtaataagtaagtgttagtaaatgttatgaagtaattaaaattaggtgatgttgatggagagttatgggagaaaggttttagataggttgattagatagtttgattaatatggtgaaatttcgtttttaataaaaatataaaaattagtcgggtgtggtggcgtgtagttttagatttgtagttttagttattcgggaggttgaggtaggagaatcgtttgaattcgggaggcggaggttgtagtgagtcgagatcgcgttattgtattttagtttgggaggtagagcgagatttttttttttaaaaaaaaaaaaaaaaaaaaaaaaaaaagaaaagagaaaagaaaaagaaaaagaaaataaaagaagaggttggttaggggaggtttaaggtgagggaaatttgggagaggcggtttgttttgtaaaaatgttggtatttttttagtaaataaaaggtatgtgtaaataattttaaatcggaataattttggaatatggaagaaatagaaagttatattggttaaggagaaagatgggtgggagagatgaataaataatcgttagtttttagggaatttttgtaaattacggtaaataatttagcgtatttttaaagttatttttcgaggtagattttgttattaattttattttgtagttaaggaaatggaggtttagtgagatgaggtgattagttttaagttatatttttaacgagaggttacgtttggaatgaatttaggcgatttaattttaaagtttatgtttcgaattattatagtatagcgttttttttaaaacgagggaatttttttttaattcgcgttataggggatttttatgtttcgggtgtatcgattagaatttttataaataatttagtaaagtgagattacgatgttcgttttatagttagggatataagtatagaggttagagaagggtgagttcgggggttttattagagttagggtaagggacgacgcgaggtagtcgtagttttacgcgttcgtagttttcgttcgggtaggtttcgtcgtcgtatatttagttcgcgcggttagtagttatcgtcgtagagaatggatatgcgagcgcgattaataaggagcggttttttcgagcggagaggcggcggcgtagttaattagcgtcgtgatggagaggaaagggcgggtaattcgtaggttcgcgttaggtcgcgttttagttgtttttagtttttataggttttggggtcgtcgtatttgggttagagatttaggatgtcgcgaggcgcggtaagcgttttttagggaagtcgaagattttgtttgagcgtattattcgaatttcgggtttatatttcgttttcgtttagaggcgcggtttttattttttagcgttcgttagtatcgggagcgttttattttttttttagttgggttttaagagttattttggtaggtcgtgtacgtttcgcgttttatttcgtggggatatagaaacggaggagggaattttagtcgcggatcgtagttggtattattcgtttttgtcgtcgtttcgttttatatttaaatttcggtaaaatggcgcgatagcgagtttgaggttagagcgtatgagcgagcggttcgttgtagggggcggggttaggaatgttttggttttatttaagttcgaagggttaatcggggtttcgttttgtttttgcgttgattttataagtgataatgttttttggttttgattatgttagtaggttttacggttttcgttttttaaagaggaatatagatttagcgagcggttgttggtttttgatttattttgatgttagggtttggtacgtaggaggtgtttaatgttgatcgatttaaggtcgtgtatatagggtttaagacggaagagaattttttgttttttttggagtttttattttagagggagatacggttagataggtttcgaatttttggttttaagtgattcgtatattttggttttttaaaatgttgggattttaggcgtgagttatcgcgtttggtttggtatgtaagttttggtatttttattatagtttataaattatatgggatttggtttttgttagtttgtttgtttttattatttttcgttttttttttttttttatttttatttagtttcgttattttattttttttttgtttttttaagttttaagtttatttttattttagagtatttatatttgttgttttttgtgttgggatgttttagatttttgaatgattggttttttttttatatttaggttttagtttaaatgttatttttataaaagaggtttatttgaaattgtttatttattattatttagtatataaattagggttgttaggtttagtaaataaaatgtaggttgtttaggttaatgtaaattttagaaaaaaatttataattttttagtataaatattgtgtaggatatatttatatttaaaaattatgtattgtttatttgaaatttatattgaattgggtgtttagtgtttgatttggtaagtttagttttatgatattattatggtatttattattttttaattaattgttttttttttattttgttttttttttcgtttttttttttttaaatttttgtttttttttttatttataatttaagggattttatatagtaagggttttttttttttttttttttttttaaagatagagttttgttttgtcgtttaggttggagggttggagtgtagtggtgttgttatagtttattgtaatttttgttttttaggtttaagtaatttttttgatttagttttttaagttattgggattataggtgttcgttattatgtttcgttgatttttgtatttttagtagatacggggttttattatattggttaggttgattttgaatttttgattttgtgattcgttagttttggttttttaaagtgttgggattataggtatgagttattacgtttggttagggtttttttttttttttttttttttttttaagaggtagggttttgttttgttatttaggttgtagtgtaatggtataattatagtttattgtaatttcgattttttaggttaaagtaatttttttattttagttttttgagtagttaggattataggtatttgttattatatttggttaattttgaatttttttgtagagatgagtttttattatgttgtttaggtaaatttttggttttaagtgatttttttattttcgttttttaaagtattgggatagggttgggtatggtggtttacgtcggtaattttagtgatttgggagatcgaggtaggtagattatttgagattgggagtttgagatttgattaatatggagaaatttcgtttttattaaaaatataaaattagtcgggtgtggtggcgtacgtttgtaattttagttatttgggaggttgaggtaggagagtcgtttgaattcgggaggtagaggttgcggtgagttgagattttgttattgtattttagtttgggtaataagagcgaaattttattttaaaaaaaaaaaaagtttcgggattataggtgtgagttattatatttagttttatattgatggtatttatagttgtatttttagtattaggtatatagtagttgtttaataaatgtttgttgtatgttgaatgaaatgttatatataaataagtgaagtttatggagaaagatatatgagtgaaagatattggtgaggtcgggtacggtggtttatgtttgtaattttagtattttggaaggttgaggtaggcggattatgaggttaggagatcgagattattttggttaatatggtaaaattttgtttttataaaaatataaaaattagttagatgtggtggtatgcgtttgtagttttagttatttaggaggttgaggtaggagaatcgtttgaatttgggaggtagaggttgtagtgagtcgagatcgagttattgtattttagtttgggtgatagcgagattgtgttttaaaaaaataaataaataaataaaataaaaataaaaataaattatgatggttagaagacggtggaatattttaaaaaaaaataaagatattggtgaaaaagatgtatttttattattgtagtaatagtattagtaattattagtaattattttaatcgttttaatttgtatttttttttttttttgagacggagttttatattgttgtttaagttggagtgtagtggtgcgatttcggtttattgtaaattttattttttgggtttacgttatttttttgttttagtttttcgagtagttgggattataggcgttcgttattatgtttagttaattttttgtatttttagtagagatagggttttatcgtgttagttaggatggttttgattttttgattttatgattcgttcgtttcggttttttaaagtgttgggattataagcgtgagttattatattcggtttattaatttattttaatataattaatatgtttttttagttttagggagaatgagtttgatgattttattattttttatttttaagagttaatcgtaaaggaggttggttggtattttgtgtttgtttagtatttttattagtttttgtagaaaatttttaagttgtgttaagacgattatgtttggatatagtttttggtgttacggggtgtttttttttattgtttatcgttttttgtagttattagaataattatgtaggtgagagttatagaaaggttgagtgtttttttttattttgtatggtttatgggtgatagttaaagatttttttgggaattttttttattttagttttattatatgtatatatttttggggcgtgttataatttttaatagattgtgttggaaattaaagaaaataatttatttattttaaggagtaggagattaagtatttatttatgtagttttttttttttttaaatttttataaaataatttgtttaggttgggtatggtggtttacgtttgtaattttaatattttgggaggataggatgggttattcgaggttaggagttcgagattagtttggttaatattgtgaaattttatttttattaaaaatataaaaattagtcgggtgtggtggtgggtgtttgtaattttagttatttgggaggttgaggtaggagaattatttgaatttgggaggtagaggttgtagtgagttgaggtcgtattattgtattttagtttgggcgataaagtaagattttgttttttcgcgtaaaaataaaaaaaattttaatttgtttaatgtaaggaaagatattttgaaaagatatattgtttatggtgtgttttttgaggaagataattttatattttatttggatttagaagggcgtggatatatttggttatgttgggaaagaataagttttatgttttaatttcgtttttaaagtttaattgagatgtagaagagtgttaatagttaaatattgagaagtatttgattgttgttttttattttttttaaaatggaggtattttaatttttttttttttttttgagatggaattttattttgttgtttaggttgtatagtatagtggcgcgattttggtttattataattttcgttttttaggtttaagtaatttttttgttttagttttttaagtagttgggattataggcgtttattattatatttagttaatttttgtatttttagtagagatggttttattatgttggttaggttggttttgatttgattttaggtgatttgtttattttggttttttaaaatgttgggattataggcgtgagttattgtatttggtttatttttgtttaaatatatgtttatatgttataaaaatttatacgtttgagattagtttgattaatatggtgaaattttatttttattaaaaatatgaaaattagtcgggcgtggtattgtgtgtttataattttagttatttgggaggttgaggtaggagaattgtttgaatttaggaggtagaggttgtagtgagttgagattgtattattgtattttagttgggtaatagagcgagattttattttaaaaaaataaatttatttatataaaatgggaaattttttttattaattaggatataagttgtaggtaatatattatgttttttatttttttattttatatttttttaattaaaaatttttaaatgtatatatttaaatttttttttgtagggattgggtttttttgtgttgtttaggttggttttaaatttttgggtttaagtgttttatttattttggttttttaaagtgttgggattatagtggtttattgtaattttcgttttttaggtttaagcgatttttttgttttagttttttaaatagttgggattataggtatgtgttattatatttagttaatttttgtatttttagtagagatggggttttattatgttggttaggttggttttgaatttttgagtttaggtgatttatttgttttcgttttttaaagtgttggaattataggtgtgaggtattacgtttgatttagaagtgtattt

SEQ ID NO: 2081 - DNA, 5467 bp, Artificial Sequence
  chemically treated genomic DNA (Homo sapiens)
attacgtagtttattatttagttttttttggtttgtgttaagttattcgtggttaggtttttagtaaaaatgattgtaattattttaaggttttttttatgtatatagtatattttagaataggttagtttggttttgatttcgtattttagtagagttttgagatttattttaattggatgggtttaggttacgtgtttattatttttaagtcggggttttaaatgttttgattggatttagtgttttattttgaaataggattatgaatttatatgtttgaaattatatagagaggaatggatgttatagaggtaattataaatatttattatacgatttagggatatttatgttagtttttaaaaatacggggtgagtagaatttttgttatttgaaaggaaagaaagtaatagagtttgaaattgaatagtaagggagtataattacgtgttatatgaagatttttaattaataatagattataaatatgagggtggttttgtaatattataagattgtgtttttgttgtattttttttatatttagatatgtttagatatataaatattattgtgttgttattgtttgtggtgttttgtatagttatatgttgtataggtttgtagtttatgagtaataggttatattttaggttatatggtgtaggtttgtgtaagtatattttataatgttggtataatggtaaaattgttttatgatgtattttttagaatttgtttttattattaagtggtatatgattgtataattaaaaaatgttaaagaaatggattaaaagtttaggtagagtggatattgttggtagggagtgggagaattatttgtttttttaagattagggatagtaagtataaatataggagaaaatatggaagtttcgaggtaaagtggaggaaggttgaggaaatgttggtgattggttgtgaatgtgaatgaaggagaagaaggtgatgttattagttgaaaaagagggagaaaagtgagataaaggaattaaggggttaagataagatggatagaatatgttgtttgggaagttaatggtgttttttttattagtagagttagaaaaattttgttataatatgaaagtagaagtagagtttaaaaagatagaaagttttggttgaaaagaagaaataaataatattataatagaagataatagtattgaatgaaaataatgtttattggagaaagagagttaggaaatgaagtaagtataagaaagtaggagtttatagtaggttaaaaaaagtaattatgataaatattaagaataagatattttaatttattttttaatatttaagtatatattatttatattatttttttttttgttagataatatattatagagtattagggttaagtatgagtaatttttaatttttataattgttgttaaattttagttaagaaataaggtagaaaaattgtttttttttgtgttattaaatgtgtaggttagtaaagtgtaaattgttttttttttttttatattaaaattattataataagatatttttttttattatagtttttttgttttttgggaagaaagttttgttttaaaataaagaggttttgtgtttaaatttatatttatttgatttagagttttgttaagaaaaaggggtatgaaataaaaataataaaaatatttttaaaatttacgtttgaagtataaggttatgataaaaggtaataattttggtttaatttgttttaggatagtgattttgagagagggttttgatttgaaattggttgatgaattttagagaatagagttgttataagtataatatatattttgagtgggaaaaagaaatagtttgttggatatatttaatttttgattttgtttattataaggttgaaggggttaaatagattaggattatgtggatttaagggtttatttttttttttgaggatatattttttttattatttttttgtaggcgcgtagatgttttttattgaagatttttaattgttttggaaaatattttatatttttttaatagtaagtttttaagaaggtaatatgagtatttagtaaagtataattttattttttttttgagaggtaaaaaggttattaagatatttttgtttaatataatagttattaattatttagtattttttatgtgttaggtgttatgtttggtattttatatatattatttaatttaatttttataataatattataagatgtgtagaattatttttttatagataaagaaatagatgtatagaggttaagtatttagtttaagtttataaaattgataggtggtagagttgtatgttgaaattatgtgtgtttgattttaaagtttatatttttttttttgtattattttgtttaaaaatttttaaataatttttttatgtttataattaaaagagttaatagtttaaatagatgtttaaagaaaataaatattttttaaatgttgataaatataaatatagatttgtttaaaattatacgttgtatattatttgtagatttagtgtgaagtatacggagataaatatatatagggatagatagtagaaatatttttaggttagaaataagtttaattttttttttgttttgttttgtttttttgagacggagtttttttttgttatttaggttggagtgtattgacgtgatttttatttattgtaatttttattttttaggtttaagtgatttttttgttttagtttttaagtagttgggattatagatatgtgttattacgttcggttaataagtttaattttaaatgataagatatggttatggaatttagggataatatgagtttgacggaaagtaaatagtttaggtttgggaggttttttttataaagaggtattgagaagaatttagggtaggagagaaagggtagtggtttgttgtagtgagatttattgatatagttttatttagtagaagtattaggtaaatttatataagaaaaaataaatattgtaagtagttgagttaaagcgaatgtagaatttgagggattgaatttttttgttggttcgtgagttaagttatttatattagttgatattattgaaataaggattgtttatatttagaaaagtttatagtaggtaagaatgttttttagatttttgttatagtattaggagatgttaattattattatgtgtttttggatagtatttggtggatagagaataaggtagttataatgagtttattttggattggttttagtatataaaataaaataataataatattataagtcggttttgtacgttgttatgcggatatgtgttttttgttttttttttaagagggtatttggtaatgtttagagattttttgattgttataacgtcgggggtaggttgtaattggtatttagtgggtggaggttttttataatgtataggatagttttttataataaagaattatttagtttaagatgttaatggtgtggaggatgagaaattttggattagaggaggtaatagtatttatggtatgagggggttttggttattgatttttttgaattttttatttcgtaagtattagtttttcgggattattgtttttggtaggagaggttatgaggaggtttagaatatgaattagatagagattgtattgtttatttttttttttatttaaaataataaattattttgtagtttaggtattaggttttttcggatgttacggtatttttgtgtttttttgatattaatatatataaatatagggtttgtggcgttcggggtttttgtttgggtttaggtttttttttttttagtatcgcgtgttgtgttttggtggaggggaagagcgaaatattttgggaatggggcgttttcgtaacgttatttatttagtttagatgaattttgttttttaagaataagaagttgtggatttttagaagttggaaatcggacgagagaatatgcgttaattagggaagttaattacgttgagtttattgataaggataaggtaagggggaggtggcggaaagtttcgtttggttgattttttattgttggagtttttcggttcgtgattgttttcgcgaagagggggatcggcgttcgcggtggataggttcgacgtagggcggcgggggttattttttagcgggatcgtttcgtcgtcgggtttttttggaggggaaggaagtttttttttaagttttagtggtttttggaattgtcgggtttttttgggagggagcggtttcgggacgtgggaagatgtcgggcgggcgggaagttgtaggaagaggcgggttttttgttttttgttttttggtggttagttcggagcgggtagagggtagttcgttcgttatacgttttagttcggtaagcggtttcgggaattcggcgggcggggttgggaggagggcggggcggatataggtcgcgtttatcgagcgttttttaaaaggtatcggcgcgcgtttcgtttgggatttcggattttttggattttttttttagtttagtttcgttagtttcgtttgcggtacgtgttttcgttttcgatttaagtgagtaggggcggtggggcggtttcgcggcgtcgttaatttcggggcgggagttgtagggggtttttatcgtttttcggggtcgtgttgtcgttcggtcggcgcgtttcggtttttttcgatatttttatttcggttcgtatttgtgtttttgttagtttttttatttttgcgttttagatttttttttttttattttttaaatatatttgtttttgttttcgaggtcgtttaggttatgttttgggattttaggttcgcggggtaggtaaataattttatatgatttttaatttttttatattggtttttttgggagagaggcgggttgtgagtttcgcgtttttgttaattcgttttttagtagtcgtcggttttttcgtttagcggtaggttttttttggggtgggggtcggagttttagggttttttttgttcggagtgtggtgagtatcgagggcgattttattgggttttgttttttaggggtggaatggggtttttatattttttcgagtttagggtattgtttttgtcgtcgtatcgggtttttggtatttttattgtttggtggtgtttgtttatttagtatcgaatttttttatgttgaaggaatagtagggaaagttaattatttatttttagttttttttagaattttttacgatttaggtataaagaagaatgtaagaatgtttggttgtgaaattatgcgataggttttgcgaattatattttgggttttttagagttagatttaggagttttacgtaggtattttttggaggcgggggcgggttttttaaatcggcggatttttgttttttttttaaattagggcggttattattt

SEQ ID NO: 2082 - DNA, 5467 bp, Artificial Sequence
  chemically treated genomic DNA (Homo sapiens)
aggtaataatcgttttggtttagagggggaatagggattcgtcggtttagaaagttcgttttcgtttttagggggtgtttacgtggagtttttgaatttggttttggagaatttagaatgtgattcgtaggatttgtcgtataattttataattaagtatttttgtatttttttttgtatttgaatcgtagaaagttttggaaaaagttaggagtaagtgattgattttttttgttgtttttttaatatagaggggttcggtgttgggtgggtagatattattaaataatggggatgttaggagttcggtacggcggtaggagtagtattttgggttcggggggatgtagaagttttattttatttttaggggatagaatttagtaaggtcgttttcggtgtttattatatttcgggtagagggggttttgagatttcgatttttattttagagagagtttgtcgttggacgaggggatcgacggttgttaagaggcggattagtagaaacgcgaaatttataattcgttttttttttagagaaattagtatggagaaattaaaggttatataagattatttatttgtttcgcgggtttgggattttagggtatggtttggacggtttcggggataagggtaggtgtgtttgggggataagagagagaaaatttggggcgtagggatgagaaggttggtaggggtataaatgcggatcgggatggggatgtcggaggagatcggggcgcgtcggtcgggcgatagtacgatttcgggaggcggtggaaattttttgtaattttcgtttcggggttggcggcgtcgcggaatcgttttatcgtttttatttatttgagtcggaggcgggagtacgtatcgtaggcggagttagcgaggttgggttggagggagggtttagggagttcgagattttaggcgaagcgcgcgtcggtgttttttaaagagcgttcggtgggcgcggtttgtgttcgtttcgttttttttttagtttcgttcgtcggattttcggagtcgtttgtcgggttggggcgtgtagcgggcgggttgttttttgttcgtttcgggttagttattaggagataaaaggtaggaggttcgtttttttttgtagtttttcgttcgttcggtatttttttacgtttcgggatcgtttttttttaaagggattcggtagttttaaaagttattgggatttggagagggattttttttttttttagggaggttcggcggcgggacggtttcgttggaaagtggttttcgtcgttttgcgtcggatttgtttatcgcgagcgtcgattttttttttcgcggagatagttacgggtcgggaggttttagtagtagaaagttagttaaacggggtttttcgttattttttttttgttttgtttttgttagtaaatttaacgtgattaatttttttagttaacgtatattttttcgttcgatttttagtttttgggaatttataattttttatttttaaagagtaaaatttatttagattaaataaatgacgttacgaaaacgttttatttttaaagtgtttcgttttttttttttattagggtatagtacgcgatgttgagggggaagaaatttaaatttaggtagaaatttcgggcgttataggttttgtatttatatgtgttgatgttagaaaagtataaggatatcgtgatattcgaagggatttaatgtttaagttataggatgatttattgttttagatgaaaaggaaaataaataatgtaatttttatttggtttatattttaggtttttttatgattttttttgttagaagtaatgatttcggagaattgatatttgcggagtggggagtttaaaaaagttagtgattaaaatttttttatgttataaatgttattgttttttttggtttagagttttttattttttatattattgatattttgggttggataattttttattgtagggggttgttttgtgtattgtaggaggtttttatttattagatgttagttgtaatttgttttcgacgttgtgataattaaaaagtttttggatattgttaaatgtttttttggggagagggtagggagtatatattcgtatgataacgtatagaatcgatttataatattattattgttttattttatatgttggggttaatttaggataaatttattatagttgttttgttttttgtttattaagtattgtttaaaaatatatagtggtgattgatattttttgatattgtggtaggagtttggaaagtatttttgtttgttgtgagtttttttaaatatgggtaatttttattttagtgatattagttagtgtaagtgatttgatttacgggttaataggaaaatttagttttttagattttatattcgttttagtttagttgtttatagtgtttatttttttttgtataagtttgtttagtgtttttattgaatgaaattgtattagtgagttttattgtagtaaattattgtttttttttttttattttgagttttttttaatgtttttttgtggaaggggttttttaaatttgagttgtttgtttttcgttaagtttatgttgtttttaaattttatagttatgttttattatttgaaattgggtttgttggtcgggcgtggtggtatatgtttgtaattttagttatttggaggttgaggtaggagaattatttgaatttgagaggtggaggttgtagtgagtggagattacgttaatgtattttagtttgagtgatagagggagatttcgttttaaaaaaataaaataaaataaaaaagaaattgggtttgtttttgatttaaaagtgtttttgttgtttgtttttgtatgtgtttgttttcgtgtattttatattgagtttgtagatgatatataacgtgtgattttgaataaatttgtatttgtatttattaatatttaaaaaatatttattttttttaaatatttatttaaattgttgatttttttagttatgaatatgaagaaattatttaagagtttttagatagagtggtgtaaaagaaagagtatgggttttggaattaaatatatatgattttaatatatagttttgttatttattagttttgtaagtttgggttaagtatttgatttttatgtatttgtttttttatttgtaaaaagataattttatatattttgtagtgttgttatgaggattaaattgggtgatgtatgtaaaatgttaaatatagtatttggtatatgggaaatattgaataattgatggttgttatgttaagtaaagatattttgatggtttttttgttttttaagaaagaaataaaattgtgttttgttaagtatttatgttgtttttttgagggtttgttattaagaaggtatggagtgttttttaaaataattaagagtttttagtaggaagtatttgcgcgtttgtagaaggatagtgggagaaatgtgtttttaaggagaaggataaatttttaagtttatatggttttagtttgtttgatttttttaattttgtaataggtagaattaaaggttaaatgtgtttagtaggttattttttttttttatttaaaatgtgtattatatttgtaataattttattttttggaatttattaattaattttaaattaaagtttttttttaaggttattgttttaaggtaagttgaattaaggttgttgttttttgttatgattttgtgttttaaacgtagattttaaaaatatttttattatttttattttatgttttttttttttaataaaattttgaattagatgaatgtgaatttaaatataaagtttttttattttagggtaaggttttttttttagaaggtaagaaagttatagtgaagaggaatgttttattataatgattttagtatgaaaaaaagggaaataatttgtattttgttaatttatatatttaataatataaaaagaagtagtttttttattttattttttagttaagatttagtagtagttgtgggaattaaaaattatttatatttaattttaatattttgtgatgtattatttgatagagaaaagaataatgtaagtgatatatgtttaaatgttggaaggtagattagagtattttatttttgatatttgttatagttgttttttttaatttgttataaatttttatttttttatatttgttttattttttaattttttttttttagtaggtattatttttatttagtgttattattttttattatgatgttatttattttttttttttaattagagttttttatttttttgagttttgtttttgtttttatattatagtagagtttttttagttttattagtaagaaagatattattaattttttagatagtatattttatttattttattttaattttttaatttttttattttattttttttttttttttttagttggtgatattattttttttttttttatttatatttatagttagttattaatatttttttaatttttttttattttgtttcgaagtttttatgtttttttttatgtttgtatttgttgtttttgattttggaggagtaaatggtttttttattttttattaatagtgtttattttgtttaggtttttgatttatttttttggtattttttagttatatagttatgtgttatttagtgatgggaataggttttaaggaatgtattatgagataattttattattatgttaatattgtagagtatatttatataaatttatattatatggtttaaggtatagtttattgtttatgggttataaatttgtatagtatgtgattgtatagaatattataggtaatggtaatataatagtatttgtgtatttaaatatatttaaatatagaaaaggtatagtaaaaatatagttttgtagtgttataggattatttttatatttgtgatttgttgttgattgaaaatttttatgtggtacgtgattgtatttttttgttgtttaattttaggttttattgttttttttttttttaaatgataaaaattttgtttatttcgtatttttaaaagttgatataaatatttttgagtcgtgtagtaggtatttgtgattgtttttgtagtatttatttttttttgtgtggttttaggtatgtgagtttatggttttgttttagggtggagtattggatttagttaaggtatttgaggtttcggtttggggatggtaagtacgtgatttaagtttatttaattagagtgaattttagaattttgttggggtgcggagttagagttaagttagtttattttggaatgtgttatgtgtatggaggaggttttagagtggttgtagttatttttgttaggaatttggttacggatgatttgatatagattaagagagattagatgatgaattacgtaat

SEQ ID NO: 2083 - DNA, 6607 bp, Artificial Sequence
  chemically treated genomic DNA (Homo sapiens)
tttagtattttgggaagttaaggggggtgaattatttgaggttaggagttttgagattagtttggttaatatggtgaaatttcgtttttattaaaaatataaaaattagttaggtatggggatgtatgtttataattatatttatttgggaggttgaggtaggagaatcgtttgaattcgggaggtagaggttgtagtgagttaagattgtattattgtattttagtttgggcgatagagggagattttgttttaaaaaaaaaaaaagtgaattgatgtgaggttggtttggttatgttataagggagatggagtaattatttaaattaattttattgtaggtttgtgggttagggttttttaaaagtggtttgggggaaggggttggtgtggttgggtaatgggtgtttgttgttgatcgagtgggtcggagatgatattatgggaagatgtttttttgtattgagttgtttttgggaggggttataggagttatggttagtgggtttaggtagagttatgggtgttagatatgtttaaaatttgtaaaagtattttaaaaggttagtttataatagcgatattaattgtaggattaattggggaggttgttgttttgtgatttttagaataatggttggtaattgtttgtttatattttagttgaatttaggttttttttttttttttagtttagttttttatgagttttgtaaaggtggttgagttttggggaagggttagtattatttaaattgtaaattaaatgtttgttaaagttagtttagtttaaatttaggaataattaaggtagtttaaaagttaaaggttagagtcgggttagttggtttagattttttttattgttattatttttttatggatataatttttgtaaaggtggttttagaggtgggaggattatttgggtttaggattttaagattagtttgggtaatatagtgagatttttagttttataaaaaatgaaaaaaattagttaggtatggtggtgtatatttgtggttttagttatttaggaggttgaggtgggaagattgtttgagtttgggaggttaggttgtagtgagttgtgatcgtgttatcgaattttagtgtgggtaatagaattagattatgttttaaaaaaataaataaataaaataaaaaattttagggtttttgattggaaaagtaatataaattttaggttggttttgattagtatattaataataataatattgataatttattttggagtttagatattgttttaagttttttgtatttaattattaatttatttagttttttaaaaaaaaatttgagattggttattagtattatttttatagagagaggtatagagagttttagtaattagttttttattatatagtaggtgcgaagaagggttgggtttatatttaggtagttgggttttagtatttgttttttaagatggtttgaaaatatttgtttgtatttatatttgtagtacgaaggtagttttgatattgcgagataatgaatatataaatagaaaatagttagattaaatatgggaagagaattttgagttatagcgattgtttagaggttaaattttaatttttacggttagttagaagttttttgtttaggttttgtatatttattatatattatatattatatttattatatatttattataattaagtatttagtagaaatagagttataggtcgggtgtggtggtttatgtttgtaattttaatattttgggaggtcgaggtaggtggattatttgaggttaggagtttaagattagtttggttaatatggtgaaatttcgtttttatataaaaattagttgggtttggtggtacgtatttgtaattttagttaatcgggaggttgaggtaggagaatcgtttgaattcgggaggtagtggttgtagtagtgagttaagattatggtattgtattttatttagtttggatgatagagcgagattttgaagaaagaaagagagaaagagatagagagagagaaaaagagagagagagagggagggagggaggggggagggaggaagagaaggataatttagtatttgttaggttatattttaatttatttttttttaattgaaagttacgtagcgttagtgattatttgtatttttattgtttttatggacggaatttttgattttagaattatgaggtttttgtttaagaattttttaagacgttttagatttttaattttaggttaattagtttgaagagttttatagaggaagtgaattagtatgagaatatagtatttttaattttattttatgattttattttgttttattttgtatttttttatcggttagtagttttcgtttttagtttattttaaatttttgaaagtttttagttttaaattttttagggagatggatttgaggtttttttttagttataattttgcggtttaaattgtttgttgtaaattttgggtggtagtgtgttgattttttgtattttaggtaacggatttgttacggttatatttttagtgagtttttttttcgtttttttaggttatagttttttttaggtgtatttgagttttttttttttattttaggttttttttcggttttgttttcgtttgttgaggaatttcggttaatataagagaggacggcgatttttttgtatagtaagttttgaataaatcgttttttgtttttatttgcgtgggttttatttttatagttgttatttttttatttgtaaaacggaggtatttgggattagttttagtaaggagagtgaggattcgattttaggaagtattttaggaataaaggttttaaggttaatattttttacggtataagtttaatagagttgtaggaatcgtataagtagcgggaatatttttttttttttttgattatgtttttttttgatgttttgttttttatatagaagagttttttattttcgtggggttaattttgtttttatttatttaataatgatggggggttttgtttcgttttttttaggttttaattatatttgattgtttatttttttgggtttttttttgaagtgatagattaggttgtgttttggtaggtaagagaaaggattttataatttatttatgggtcgttttagttggggttttgtatgtaggagcggattagtttttttgagggatagtttttgggtgggggttttgggttattttgaggagttaattatattaataggtgtttagtataggttttatttttattttaaataaggtaagcgatttttttttttcgtaggtggtttagtttaatagaaattttaaattaaagggattgtgtggtggtttaagtttgttattttagtattttgggggatggatcgattttagtttaggagtttaagattagtttgggtaatatagtgagattttatttttataaaaatattttttaaaaaaattaggggtgtagtggtttatgttaataattttagtattttgggaggtcgaggtggatagatcgtttagaagttttagattagtttgggtaatatggtgaaattttttgtttttatatatgtgtgtggtagggtgggtttgtggttttagttattatagtagttgaggtgggaagatcgtttgagtttaggaggtttaggttgtaatgagttgtgattaggttattgtattttagtttggttaatagagtaagattttgttaaaaaaaaaaaaaagaaagaaagaaaagaggttaggtacggtggtttacgtttgtaattttagtattttgggagttcgaggtaggtggattacgaggttaggagttcgagattagtttggttaatatggtgaaatttcgtttttattaaaaatataaaaattagttgcgtatgaaggcgcgcgtttgtagttttagttattcgggaggtcgaggtaggagaatggtgtgaatttcggaggcggagtttgtagtgagtcgagattgcgttattgtattttagtttaggcgatagatttagatttcgttttaaaaaaaaaaaaaaaaaggtcgggcgtagtggtttatatttgtaattttagtattttgggaggttaaggcgggtggattataaggttaggagatcgagattattttggttaatatagtgaaatttcgtttttattaaaaatataaaaattagttaggtgtggtggcgggcgtttgtagttttagttattcgggaggttgaggtaggagaatggcgtgaattcgggaggcggagtttgtagtaagtcgagatcgcgttattgtattttagtttgggagatagagcgagatttcgttttaaaaaaaaaaaaaaaaaaaaaaaaagaaaagaaaaggaaagaaagaaaagaaattttaaaacgtaaattttattagagaattttgttttttttttatttttttgatttattttttgtttttatttagtttggagcgcgtgggcgtcgtttttttttttttgggtttttttgtttattttttttagtttttagtgttttcggttataagcggtgatgtttattgtagttcgtatatttgttttcgcggggtcgggatttttgatttttgatttttgtagcgttgcgtttcgttttttttcgtgcgcggttcggatttcgttattttgtaggattgcgtttatttcgattgttttttttttatcgttttattttgcgcgtttaatttatcggcgatattcggtcgcgttttcgtttcggttcgtgtgattcggcgttcggaaagacgatattagtttcgggaggggggcgttttttttcgatattagcgttgggcgcggagatttagtttgcggcgagtggtggttaggtttttcgtttcgcgtttcgtttcgcgtttcgtttcgcgcgtttttttttgcggggttatcgcgatttcgtaggggatttcgaagttaaagtgtttttttttcgttttttggtttcgttcgcgcgttacgtgattttagcgtttatttgggttgaggagtcgtcgcgttttttcgtcgagttttttcgttagatttttttcgtcgtcgttaagatgatgtgcggggcgtttttcgttacgtagtcggttatcgtcgagatttagtatatcgtcgattaggtgggtgggtcgcggggacggggtcggttcggagttttgttttagttttagggcgcggtcgcggtttttggagcgaaagaagtcgttttggtttcgttgcgtatttttgggttggttcgggttgtggtcgtgagaggttttttttcgttcgggcgttgcgcgcgagtgagtagcggggggtcgcgtttggggcgtcgttggggagatattgggtttcgttgaatatagtaagggcgagtgggaattgatagttcggagtagggtgcggtttttgtatggatagtttttgagaggaaattttagggatgaggcgtttttggttttaggtaggtagggtgatcgggcgtcgtcggcgatggcgtaggtgagtagtcggtttcgatttttacggtgattcgatagtaagcgggtgggaagggtttggttaaattgatttagttaggttttttgttaaaagtggattttataaggaagtgcgtaggtggtttaggcgttttaggagttcgattatagtttggttaagtaagaatttttgttaatatttttatttagttcgggaaaaaaattatgagagagagtgtaagaggtttttagtgataaggtatatgggttaaaaatttaagtgtatttgtataaaaggtttataggtttttttatatgttttcgattttagtattgttttaaattgtaagtttaaataaaaagttaaaatatagaaaaataagataaaaatcgggttgggttgtagatggtaattttttttgtgtttcggttttttcgtttgtaaaatggacgttttgttgttttgcgtttgttagaagattttggaggggttgaaatgagtaggttatttgtgtaagaagtttttttcggtggagtataggttaggttcgtttcgttgttatggttggtgatcgacgggatgttttaagtaagaataggtttaggcgatgttgaggtttgtgttttttttttttgtttttgagatttagttttatttttgtttagggtggagtgtagtggtataatttcggtttattgtaattttcgttttttaggtttaagggatttttttgttttagtttttcgagtagttgggattgtaggtgttcgttattacgtttagttaatttttgtatttttagtagaaacggggttttgttatttggttaggttggttttaaatttttgattttaagtgattcgtttattttagttttttaaagttttgggattatatttttgagttatcgtatttagttggaattgtttttttttattttattattaggttgatagtttaaatgtttttttagttgtaagagataattgtgtgaagagttagtgttagaatcgtgtgtgtgtttatatgcgtgtaagttattttagtaggagggaatttaagaagttattgagatatttttattttgttttttttgtttagg

SEQ ID NO: 2084 - DNA, 6607 bp, Artificial Sequence
  chemically treated genomic DNA (Homo sapiens)
tttagatagaagggatagaatgaggatgttttagtggttttttggatttttttttgttagagtaatttgtacgtatgtgagtatatatacgattttgatattggttttttatataattgttttttataattgaagggatatttaaattgttagtttaataataaagtagaaaaaaatagttttagttgggtacggtggtttaaggatgtaattttagaattttgggaggttgaggtgggcggattatttgaggttaggagtttgagattagtttagttaaatggtaaaatttcgtttttattaaaaatataaaaattagttgggcgtggtggcgagtatttgtaattttagttattcgggaggttaaggtaggagaattttttgaatttgggaagcggaggttgtagtgggtcgagattgtgttattgtattttattttgggtaagagtgagattgagttttaaaaataaaaaaaaaaaatataggttttagtatcgtttggatttgtttttgtttggggtatttcgtcggttattaattatgatagcgaggcgggtttggtttgtgttttatcggagggggttttttgtatagatgatttgtttattttagtttttttagaattttttggtaggcgtagagtaataggacgtttattttatagacgaggaaatcgagatatagggaaggttgttatttgtaatttagttcggtttttattttgtttttttgtgttttaattttttatttagatttatagtttgaaatagtgttagaatcggaagtatgtaaagaaatttgtggattttttatgtagatatatttaagtttttaatttatgtgttttattattggggattttttgtatttttttttatgatttttttttcgaattagatgaggatattgataaagatttttgtttggttaaattgtagtcgggtttttgaagcgtttaggttatttgcgtatttttttgtaaaatttatttttagtaagaagtttggttaagttagtttagttagattttttttattcgtttgttatcggattatcgtggagatcggagtcggttgtttatttgcgttatcgtcggcgacgttcgattattttgtttgtttgaaattagaagcgttttatttttggggtttttttttagagattgtttatgtagggatcgtattttgtttcgggttattaatttttattcgtttttgttgtatttagcggagtttaatgtttttttagcggcgttttaggcgcggtttttcgttgtttattcgcgcgtagcgttcgagcggagggaggttttttacggttatagttcgggttagtttaggggtgcgtagcggggttaaagcggtttttttcgttttaggagtcgcggtcgcgttttgaggttaaggtaggatttcgggtcggtttcgttttcgcggtttatttatttggtcggcgatgtgttgggtttcggcggtggtcggttgcgtggcggagggcgtttcgtatattattttggcggcgacggagggaatttggcgaggggattcggcgaggggacgcggcggttttttagtttaagtaggcgttggggttacgtgacgcgcgggcggaattaaggggcggggaggaggtattttggtttcggagttttttgcggggtcgcggtggtttcgtaagaagggacgcgcggggcggggcgcggggcggggcgcggggcggggaatttggttattattcgtcgtaggttgggttttcgcgtttagcgttggtgtcgggagggagcgtttttttttcggggttggtatcgttttttcgggcgtcgagttatacggatcggggcgggggcgcggtcgggtgtcgtcggtgggttgggcgcgtagggtgggacgatagggaaggggtagtcggagtaggcgtaattttgtagggtggcggggttcgggtcgcgtacgagggagggcggggcgtagcgttgtaggggttaggggttaggggtttcggtttcgcgggagtaggtgtgcgggttgtagtggatattatcgtttgtgatcgagaatattgaaggttgaagggggtggatagaggggtttagggagggggagacggcgtttacgcgttttaggttgggtgggggtagggggtagattagagggatgagaagaaggtagggttttttggtggaatttgcgttttaggatttttttttttttttttttttttttttttttttttttttttttttttttttttgagacggagtttcgttttgttttttaggttggagtgtagtggcgcgatttcggtttattgtaggtttcgtttttcgggtttacgttatttttttgttttagtttttcgagtagttgggattataggcgttcgttattatatttggttaatttttgtatttttagtagagacggggttttattgtgttagttaggatggtttcgattttttgattttgtgatttattcgttttggttttttaaagtgttgggattataggtgtgagttattgcgttcggtttttttttttttttttttgagacggagtttggatttgtcgtttaggttggagtgtagtggcgtaatttcggtttattgtaagtttcgttttcggggtttatattatttttttgtttcggtttttcgagtagttgggattataggcgcgcgtttttatgcgtagttaatttttgtgtttttagtagagacggggttttattatattggttaggttggtttcgaatttttgatttcgtgatttatttgtttcgggtttttaaagtgttggaattataggcgtgagttatcgtatttgatttttttttttttttttttttttttttttttgatagagttttgttttgttggttaggttggggtgtagtggtttgattataatttattgtagtttggattttttgggtttaagcgatttttttattttagttgttatagtagttgggattataggtttattttattatatatatatatagagatagagagttttattatgttatttaggttggtttggaatttttgagcgatttgtttatttcggttttttaaagtgttgggattattggtataaattattgtatttttaatttttttaaaaagtgtttttgtagagatggagttttattatattgtttaggttggttttgaatttttaggttaaaatcgatttattttttaaagtgttgggatgataggtttgagttattatatagtttttttggtttagggtttttgttagattggattatttgcggaagggaagggtcgtttgttttatttggggtgggggtggggtttgtgttaggtatttgttggtgtgattgattttttaaaatgatttagagtttttatttaagggttgttttttagggggattggttcgtttttgtatgtaaggttttagttggagcggtttatgaatgggttgtggggtttttttttttatttgttagggtatagtttggtttgttattttagggaagggtttaaaggggtgggtagttaggtgtggttgaagtttggggggagcggggtagagttttttattattgttgaatgagtgaaggtagagttgattttacgaaaatggaaaatttttttatgtggaaagtaaagtattaggggaaaatatagttaagaagagaaagggatgttttcgttgtttgtacggtttttgtagttttgttgggtttgtgtcgtggaaggtgttggttttgaggtttttgtttttgaggtgttttttggagtcggatttttattttttttgttggagttggttttaggtgttttcgttttataaataggaggataatagttgtggaaataaagtttacgtaaatgagaataaaagacgatttatttaggatttgttgtataagggagtcgtcgtttttttttgtgttgatcgagattttttagtaggcgggggtagagtcggggaaaagtttggaatgggaaggggaggtttaggtgtatttgagggaggttgtggtttggggagacggaagaggggtttattaggagtgtgatcgtgataggttcgttgtttagggtgtaggaagttagtatattgttatttagggtttgtagtagatagtttgaatcgtaaggttgtaattgggaggagattttaaatttatttttttgaggagtttggggttgggaatttttaggggtttggagtgggttgagggcgggggttgttgatcggtggagaagtgtagggtgaagtagggtggagttatggggtggggttgaagatgttgtatttttatgttggtttattttttttgtggggttttttaaattggttggtttggaattaaggatttgaaacgttttaaggaatttttaaataaaagttttatgattttgaagttagagatttcgtttataggaatagtaggggtgtagatagttattagcgttacgtgatttttagttagaaggaagtgggttaaagtgtagtttgataaatgttgagttattttttttttttttttttttttttttttttttttttttttttttttttttttttttttttttgtttttttttttttttttttttttagagtttcgttttgttatttagattggatggagtgtagtgttatgattttggtttattgttgtaattattgtttttcgggtttaagcgatttttttgttttagtttttcgattagttgggattataggtgcgtgttattaagtttagttaatttttgtatagagacggggttttattatgttagttaggttggttttgaatttttgattttaggtgatttatttgtttcggttttttaaagtgttgggattataggtatgagttattatattcggtttgtaattttatttttgttgaatgtttagttataataaatatataataaatataatatataatatataataaatgtatagaatttgggtagaaagtttttggttagtcgtgaaagttgaggtttggtttttggatagtcgttgtggtttagagttttttttttatatttggtttggttgttttttgtttgtgtgtttattgtttcgtaatgttaaagttgttttcgtgttgtaggtgtgggtgtaagtagatgtttttaaattattttggagggtaggtgttggagtttagttgtttgagtgtggatttagttttttttcgtatttgttgtgtggtgaaggattaattgttgaaattttttgtgtttttttttgtggggataatgttaataattaattttaaatttttttttaaaggattaagtgaattagtaattaagtataaaaagtttgggatagtgtttgagttttagggtgagttgttagtattgttattattggtatgttaattaaagttaatttagaatttgtattatttttttaattaaaagttttggaattttttattttatttatttatttttttgagatatggtttgattttgttgtttatattggagttcggtggtacgattatagtttattgtagtttgattttttaggtttaagtaatttttttattttagttttttgagtagttggggttataggtgtgtattattatgtttggttaattttttttattttttgtagagttggaagttttattatgttgtttaggttaattttgaaattttgggtttaagtgatttttttatttttgaaattatttttgtaaaaattgtatttatgagaaaatggtggtagtgggagagatttgaattagttgattcggttttggtttttagtttttaagttgttttgattatttttgggtttaggttgagttaattttggtagatatttagtttatagtttagatgatattggtttttttttaaaatttaattatttttgtaaagtttatgagagattaggttaggagaaggagaggagtttgggtttagttaaggtgtagataaataattgttagttattattttggaggttataggatagtaatttttttagttagttttgtagttaatgtcgttattgtagattggttttttgagatatttttgtaggttttgggtatgtttgatatttatggttttatttggatttattgattatggtttttgtggttttttttagaagtaatttagtgtaaaaggatatttttttatgatgttattttcgatttattcggttagtagtaagtatttattgtttagttatattaatttttttttttaaattatttttgaaaaattttaatttataggtttgtaatgaggttgatttgaataattattttattttttttgtggtatggttaggttagttttatattaatttattttttttttttttgagatagagtttttttttgtcgtttaggttggagtgtagtggtgtaattttggtttattgtaatttttgtttttcgggtttaagcgatttttttgttttagttttttaagtaagtgtgattataggtatgtatttttatgtttggttaatttttgtatttttagtagagacgaggttttattatgttggttaggttggttttaaaatttttgattttaggtgatttattttttttggttttttaaagtgttggg

SEQ ID NO: 2085 - DNA, 7624 bp, Artificial Sequence
  chemically treated genomic DNA (Homo sapiens)
agagaaagtttgaaattttttagagattatttaagtggttatgattagaatgttgatagaaatatgaatagaaaagattatttcgatgaggttttagatggaaatgaggaataaggtattggaaattggagtaaaggttatcgttgttataaattggttaagattttggttaaattttgtttatgttttaggattttatgaaatgtagaatttaatagtgataaattaggatatttggtggaaggaatatttaagtagtaaagtatttaggttattaaatggttttttttaattatttatagtaagatataagaaaaaatagaatagaaaaatattagaaaatttgaagtttggttattttaatagtgaaaggggtgtttgggtatggttaagagattgttaaagaggttattatggatagaatgaagttaaaggttatttatgataatgaaattaaaaattttagaggtatttttgggatttttgaggttgttttttttttataggttttgagttttaagagggtagaataatttcggggatggattgttgtttagggttgttttgggtttttattttttgcgttttagtatattgttttttagcgtttttagttgtggtttaagtagttataggtgtagattaatttgtagttttaggatgtataagtggtaaattatggtagtatttatgtggtattaattttgtaggtgtatagaatgtaagagttgtggaggtttggtagtttttatttagattttgaagaatgtgttggattgtttgagggtagagttattgtagagagtttttattagggtaatacgaagtggaatagtggaattggggttgttgtatagagtttttttaagggtaatgtttaatgtagttgtaagagttagattgttattaggattttagaatagtagagttattagtagtatgtaatatttgtttgggaaagttgagggtattagggtgttttgaggttttttgaaatattttattttttaatgtgtataagatgttgtatatggaattaagaaagattattttttagttttaaaatttaagttttttttgttgagtttttgatttgtttgggtttgttattttttttttttggtttgtttgttttttttggaaagggagtgtatattttatatttgttttattattgtatttaggaagtagataatttgttttgattttataaatttttagatgatattttagatttttgagttggtgttggaataaatttagttttttgggattattaggatggaatgattgtattttgaattgtgagaaggttatgaattttgggggttagggatagaatgttgtggtttgaatataggttgttttttaaaagttatgtgtcgagaggtgggatttttgagaagtgattggtagtgtttttatgaatggatgaatttattatgggttaatagattaatggattatggaattattaaggattagttattatgagggtgggtttgtaataagtattagtttggttattttttatgattttttttgttacgtgatattttgtattattttgggattttgtaaagagttttaattagtaagaagggtttttttcgatggggttttttgattttggatttatttgtttttagaattataaaaaataattttttttgttttaaattatcgagttttaggtatagttttagtaatagaaaatagattaagatagatgttgatgtttttggttttaggttatattttgagaattattgttaagtaatgttgtttttttgtaaatttgtttttaatgatgggagtttattgatagattatgttttgtatataagtttatttttgttttatataattttaatatatattgaatttttgggaatgtaattttttgataaatttttaatagaaaattttattttgtttttttgggaatttgattaagaattgtttaatattaataattttggtatggtgtttgagtgattaattgataaggtatttgagttataatttattagaaattatttgtgtttttagaaaaaagtttttattatatttattacgattttataattttatatagaagtgaaattatttttgtaaaaattataattgtgaaagaaattagatttaatcgattttattttgtttttaatttttaagttgtttttttttatttttgggtataggtggaataaattttgggaagtaatttagtttatggtttgattttgaaataaaattgataatagtttttttttaaaaagattttttttttgtttggggattagtttgttttcgtaggattaataaattagttataagattagaaattatagtttaggggttatgtggtttttggttttaagagtttgtatttttttattttttaagttgtttttggggataatatttttattgtaaaatttaagattagtgtttgagatattttatagattttgtattttatagattagttgatattattgagattagtaatttggtttaattatatttgttattttatttaggaatagaagatagtaagaaaaatttatttagattttttatgattttatttttaatttaattaattagtattttttattttttaagtttttatttattaaattatttttgaaaattttgatttttgaatgttcggggagattgatttgagtgataataaaattttcgttttttttatagtcggttttgtatgaattattttttttttattgtaatttttttgttttgataaattggttttgtttaggtagtaggttaggtgaatttattgggtggttatagaagtgtgaagagtaagtatttgagtgttttattatgttttttaatatagttatatttgaatattttatatgatgggatataatttattatattagaaatatatttaaaatatttgattttttttttatattatatttggtattatatttttttttattaagtgtgtaagtagtttatatattaattttattttagaaagtaaaggatttggggtttgattagtttgagaattaattttttgtgtgtgcgtggaatggagagttagtagttatttttgagagagaatagtatgggaattattagattagtagaaataaattaaattgaaaattaatgtgtttgaggtttatttttaaattttattaagtggtaatatgatatttagtaagtgatttaattttttgaatttttattttttaattttaaaatgaatttattagattaagaggtttataagatttttttttattatttaattattgaataaagattgttttaaattttttttataattaagtgtgttgttttgattatatttattaaagaaatttttatttaaattggttttttaatattgatgatttaatataaatttaatgttttaataattagtaatatatttttttagagatttaggaagggaagtttaatttgttagggtatttttaaataaatagtgtgttagtttaattatataatgttagtttttaattttaagaaggtatataaaatttaaaagtaaggtgttttttaatttttcgttattaatttcgttttaggttttggaaatttgtgtttttattgaagagtatttttatttttgaatttttaaggataattttttttgttttattgaaattggtttttaagtttggtaattaagataagaatattaagtatatttattttaatatttaaggatattttttgaataaattagaatttagggagatataagtgaataatttggatttgttttttttgaatgtttataatttggtggaaaaaaaatggatatatgaatattgatttgtgattagtgtaaagggggtaaaaatttatattttaaagaaaacggggatatattaggtttgttttgtttattattgtgtttatagggtttgatatttagtaggtttagtgggagaaaggagttttaattattaataaaagttaggaaagaacgggaggtttttacggaaaagggtgatatttaaattgagtaaggaggtatttggaaatagtgttatttaataatttttggcgattagattgatatattagaacggtttataagattagtttttttttattggttagtttttttttttattttttttattttgggtaagtcgttttttttttttgggttttttgttttttttttgtaatataaaaggggttgagtaatattatttttgagagcgttatgtgtgtgcgtgttagagggaaaatttttataacgttaatatattaaaattgtaggtttgtataaaaattgaattttgttgaatgtaaataggtaaatagtatttattaggaaataaaataaaattaagtatataaaaaagtaggaagagttggaaaacggaaggaagataagtttttaaatagttggaatagttgatgttagttagcgaagttttttagaggaaaaaataagaagttggttatgaggtaagtggatttgagaaaaaagattaaaggggaagaatagtaagtaaaatagaattttatttgttagatttttttttttgtcgcgtttttttatttgatttatttttttattttttttatattttttttttttttttttacgttatcgtataggaacgaagtttgggttatgtgcggatcgtttgtggtttttaaattttttttttgttattttggtcgtgtaaaattttgaaacgtttttcggtaaaaaaaataaaaataaaaaaaaaaaatttgtttttggttttttttttagttttgggtttagttgtagttaagtgaggggtagcgcgcgtttttaagttttcgttttagagacgcgtacgcgtttggcgtttaatttttaattttttgttgtttagtgatttcgtttacgggttttcgggtcggcgtagttattttaaggcgcgcgtttcgtggtggatttatcgttagttcgtagcgttcggttttttggtaattttttatttttttttttagttttttgtagtatgggtgttgggttttttttgttgttcgtcgtttttttgttgttttttttcggcgacggcgtcgtgcgttgcgatatatttgttaattgtatttattttgatttgttgggtatttgggttttttaggtgggttttagcggtttttagcgcgatgttaattgttcggttatgggtaagtcgtcggttcggtagtttttcgggtcgttttttttgtttttgagtttttaacgtagcgttacgttaattatcgtttttttttaggtagacgtttgtgggtggttagagtattttgattggattcggggatttttggggattttttttttcgttaggttcgcgaagttaaagtttatttgttgagaatttttaattttatatttttttggttattttggggatttaatattttgattaagaatttttttatttttttcgtttaattttgtttgttttgagagagatttgggaattgtaatcgtttggttttttagttcgatttggtagcgttatttttaaaatttatttttattttttattattattttattagtgaagatagatgagtttagagattttcgaggatatagtatgaagttttttttttttgttagatggtgggaaagggattttttgtttagcgattttggtttgagcgggtgttgatgagtattagaaaacggttagtattattttgtattgttttatgtattgtaaggaggtaaaaattttttaaaaaattaataataaagaaaatttaattttgaatttagtaattagaaatgtttagagtttgtataatgtttggtttatggaaggtttttaataaatatttagtgtttgaatatattggagatattttatatgtttttagataatatggttatttttagaataaagaatttagtgaagggggtggggtggaaaaaagataattattagttagaagagttatattgtggtttatttaaatttttttatagtttgtgatttttgtagagttagtaaaaaattagttataatttttttgttaatagaataaagattaagttatttgttattaaagaaatatttttttaattgattgtatagtattttataattttgaatattgtaatttttttttttttttttttgagaatggagttttgttttgttatttaggttgtagtttagtggcgggatttcggtttattgtaattttcgtttttcgggtttaagcgatttttttgttttagtttttcgagtagttaggattacgggtatatgttattacgttcggttaatattttgtatttttagtagagacgggttttattgtgttagttaggatggtttttattttttgatttcgtgattcgttcgtttcggttttttaaagtattgggattataggcgggagttattacgtttggttttttttttttttttttttttaaatttgagtttgaaggttggggtagaaagagattaggatttgtattgttttgttatatgtaattttttatgttagagtattatttttaaatatggaaaaattttaaaatatataattttttagatggatatagttgaattatttttaggaaggttttgtttataaaattatttttggttttaatttagtaattaaaggtatttataggtttgagtttttatttatgaaggttaaacgtattatttttattagtattaattggttttataggatatagatttttagtttgttgaataaattttggaaggatttagattatgaggttttaaattgtagagtttttgaggagaaaggtattttatttttttttcgaatagattattttgtgtttttttttgggtttagtatattgttttttttaggatttgatagtttgtttatttatttttttgttgttatattttttatttttgtattttttatttttgattagtattttgtttttttttcgtttttggaagtttgtaatttttaatattttttatttttttttttgtttagtggaaaaatttttttagtgttgggatgttttggaaaggtattgtagttttgggggtttttttgtttgttgggttgtatagtatattttttttttttgagataaggttttattgtgttgtttaggttggaatgtagttgtgtaattatagtttattgtagtttttaatttttgggtttaagtaatttttttattttagttttagtcgtttaaatagttgggattataggtaatgtattattataattagcgaatttttaaaaattatttttgtagagatagggttttattatgttgtttaaattagttttgaagttttgattttagtttcgtaaagtgttaggattataggcgtgagttattgtttttgtttgtattattttaaatttttagagtttaattttatagttttgtttcggagtaggaattgtttgaggtaataagatggagtttttggtttttttattaggtagattgtgtttaaattgggtagtatgaaaggaaagtagtataattaaaattgaaattgggggatttttttttttattgaaatttaaataatttttttttattgtgttttttttttttttttttagg

SEQ ID NO: 2086 - DNA, 7624 bp, Artificial Sequence
  chemically treated genomic DNA (Homo sapiens)
tttaaagaaaaaaaaaaaaagtataataaaggaaaattatttggattttaataggggaaagaattttttaattttaattttaattgtgttgttttttttttatgttatttagtttgagtatagtttgtttagtgaagaaattagaggttttattttgttgttttaaatagtttttgtttcgaggtaagattgtgaagttaggttttaaaaatttgagataatgtaagtagaagtagtggtttacgtttgtaattttagtattttgcggggttgaggttagaattttaagattagtttgggtaatatagtgagattttgtttttataaaaataatttttaaaaattcgttggttatggtggtgtattgtttgtagttttagttatttgagcggttgaagttgaggtggaaggattgtttgagtttaggagttggaggttgtagtgagttatgattgtataattgtattttaatttgggtaatatagtgagattttgttttaaaaaagagagatatgttatgtagtttagtaggtagggagatttttaaaattatagtatttttttagagtattttaatattgaagaaatttttttattgaataaaaggagaaatggggaatgttgaaaattataggtttttagaaacggagaaaaggtaaaatgttagttaaaagtgggaaatgtaagaataaaaggtatgataataaaaagataaataaatagattattagattttaaggaagataatgtgttaagtttaggagaagatataaaatgatttattcggagaagaaatggggtatttttttttttaaaggttttatagtttagaattttataatttgaatttttttaaagtttatttagtaaattagaggtttgtattttataaaattaattagtgttgataggaatgatacgtttaatttttatagatgagggtttagatttgtgggtgtttttaattattgaattaaggttaaaggtaattttataggtagagtttttttgaaaatgatttagttgtgtttatttggagagttgtgtattttaaagtttttttatgtttgagagtaatgttttgatatgggagattgtatgtgatagggtagtgtaaattttgatttttttttgttttaatttttaaatttaaatttaaaaaaaaaaaaaaaaaaaaggttaggcgtggtgattttcgtttgtaattttagtattttgggaggtcgaggcgggcggattacgaggttaggagatggagattattttggttaatatagtgaaattcgtttttattaaaaatataaaatattagtcgggcgtggtggtatgtgttcgtaattttagttattcgggagattgaggtaggagaatcgtttaaattcgggaggcggaggttgtagtgagtcgagatttcgttattgaattatagtttgggtgatagagtaagattttatttttaaaaaaaaaaaaaaaaaagttataatgtttaggattatgaaatgttatatagttagttaaaaaggtatttttttagtaataaatgatttaatttttgttttgttgataagaaaattatagttgattttttattgattttgtagaagttataggttgtaagagggtttgggtagattatagtgtgatttttttaattagtgattgttttttttttattttattttttttattaggttttttgttttaggggtaattatgttatttgaaggtatatggaatatttttagtatgtttaaatattaggtatttattgagagttttttatgagttaaatattgtgtagattttgggtatttttaattattaggtttagagttaagttttttttgttattaattttttaaaaaatttttatttttttgtaatgtatgaaataatgtagagtggtattagtcgttttttagtatttattaatattcgtttaaattaaaatcgttgggtagaaagttttttttttattatttaataaaaagagaaaattttatgttatattttcgagagtttttgagtttatttatttttattagtaaaatagtaataaaaaataaaaataaattttaaaaataacgttattagatcggattggagaattaaacgattgtagtttttaagttttttttaaagtaaataaaattaagcgggaggaataaaaaagtttttgattaaagtgttgagtttttaagataattaagaaagtgtggagttagaagtttttagtagatgaattttaatttcgcgagtttggcggggaagaaggtttttaagggttttcgaatttagttaagatgttttggttatttataagcgtttgtttggggggaagcggtagttggcgtggcgttgcgttaggggtttaagggtagaaaggacgattcggaggattgtcgagtcggcggtttatttataatcgagtagttgatatcgcgttgggaatcgttggagtttatttggaagatttaggtgtttagtaggttaagataggtgtagttggtaggtgtgtcgtagcgtacggcgtcgtcgtcggagagaagtagtaggagggcggcgagtagtaaggagggtttagtatttatgttgtagggagttgagaaaagaggtgaagaattattaggaagtcgagcgttgcgggttagcggtgagtttattacgaggcgcgcgttttgaaatagttacgtcggttcggaaattcgtgggcggggttattgagtagtaggggattgggggttgggcgttaggcgcgtgcgcgtttttgaaacggggatttgggagcgcgcgttgttttttatttggttgtaattggatttagaattagggaagaggttagggatagattttttttttttatttttattttttttgtcgagggacgttttaaaattttgtacggttagggtgataaaaagaggatttaagagttataagcggttcgtatatgatttagatttcgtttttgtgcggtaacgtagggagagaaggaaagggtgtggggggaataagggagtgggttaggtgaaagagcgcgatagagggagagatttagtaagtggagttttgttttatttgttattttttttttttagtttttttttttaggtttatttgttttataattaattttttgtttttttttttgaaaaatttcgttagttaatattaattattttagttgtttgagaatttatttttttttcgttttttaattttttttatttttttatgtgtttgattttgttttgttttttggtaaatgttgtttgtttgtttgtatttagtagaatttagtttttgtgtaaatttgtagttttgatgtattagcgttgtgggggttttttttttggtacgtatatatatggcgtttttagagatgatattgtttaattttttttatgttatagaggaaaagtaagaggtttagagagaggaagcggtttgtttagggtgagaagggtgaggaaggaagttagttaatgggagaaggttggttttatgaatcgttttagtgtgttagtttgatcgttaaaaattattaggtggtattatttttaggtgtttttttgtttagtttaagtattattttttttcgtaagagtttttcgtttttttttggtttttgttggtaattggggttttttttttttattgagtttattaggtgttaggttttgtggatatagtgatgaataagatagatttgatgtgttttcgttttttttgggatatgaatttttgttttttttgtattggttataaattaatatttatatgtttattttttttttattagattataaatatttaaagagagtaggtttaaattatttatttatatttttttagattttggtttatttagaaagtgtttttgagtgttaaaataagtgtatttaatatttttattttggttgttaagtttgaaagttagttttaatgaggtaaaaggagttgtttttgaaagtttagaggtgaaaatattttttaatgggggtataaatttttaaagtttggggcggggttggtggcggggggttggggaatattttgtttttaggttttatatatttttttagaattgaaagttgatattgtataattaagttaatatattatttatttaaagatattttgatagattaagtttttttttttgaatttttaggaaggtgtgttattgattgttaaaatattaaatttgtattaggttattaatattgaagagttagtttaggtggaaatttttttgatgaatgtaattaaagtaatatatttaattgtaaagaaagtttaaaatagtttttatttaatgattgaataatagaaaaagattttgtggattttttagtttaatggatttattttaaaattgggaaatggagatttagagagttaaattatttgttgaatgttatattgttatttagtaagatttaagaatgaattttaggtatattgatttttagtttagtttatttttattaatttaataatttttatattgtttttttttaaaaataattattaattttttattttacgtatatataaaaaattgatttttaaattgattagattttaaattttttattttttgaaatgaaattaatatataaattgtttatatatttaataaaaagaaatgtaatgttaaatgtaatataaagaagaaattagatattttaaatatatttttagtataataagttatattttattatgtaaaatgtttaagtatgattgtgttggaaaatataatgaggtatttagatatttgttttttatatttttgtaattatttaatggatttatttggtttgttgtttagatagagttaatttattaagataggggaattgtaatggaggaagagtaatttatatagagtcggttgtgggggagacgggagttttattattatttaaattagttttttcgagtatttagggattagagtttttaaagataatttggtgggtaggggtttgggaagtggggagtgttgattggttaggttggagatggaattatagggggtttaagtgagttttttttgttattttttgtttttgggtgggatggtagatatggttgagttagattgttggttttagtggtgttagttgatttatggagtgtagggtttgtaaaatattttaagtattgattttagattttataatagagatgttatttttagaagtaatttggagggtgggagggtgtagatttttggagttagaggttatatgatttttaaattgtaatttttaattttgtagttaatttgttagttttgcgaaggtagattggtttttaggtaagaagggagtttttttgggaaagggttattattaattttgttttagagttaaattatgaattgaattattttttaaagtttgttttatttatgtttaggaatgaaaaaggatagtttaaagattagaagtaagatggagtcgattaggtttgattttttttatagttgtaatttttgtaaaggtggttttatttttatgtaaaattgtagaatcgtggtaaatgtgataggaatttttttttgagagtataaatgatttttgatgagttataatttaaatattttattaattaattatttaaatattatattaaagttgttgatgttggataatttttggttaaatttttaggagaataaagtagaattttttgttgaaggtttattaagaggttgtatttttaaaaatttagtatatgttaaaattatataaaataaaagtgagtttatgtgtaaaatatggtttgttagtaggtttttattattaaaagtaggtttatagagaggtagtattatttggtagtggtttttaaagtgtagtttaggattagggatattagtatttgttttagtttgttttttgttgttagaattgtatttgagattcggtaatttaaaataaagaaaattattttttatagttttagagataggtaagtttaaggttaagaggttttatcgaagggggttttttttgttggttgagattttttgtagaattttaaggtagtatagggtattacgtggtaaagggggttatgagagatggttaaattagtgtttattatagatttatttttatgataattaatttttgataattttataatttattaatttattaatttatgatagatttatttatttatgagggtattgttaattattttttaaaggttttatttttcgatatatgatttttgggggataatttatgtttaaattatagtattttgtttttgatttttagaatttatggtttttttataatttaaaatatagttattttattttagtagttttaaaagattgaatttgttttagtattaatttaaaagtttaaagtgttatttgggagtttgtgaaattaaaataagttatttattttttagatataatggtgggataggtataaggtatatattttttttttaaaagagataaataggttagaagaaagaagtaataggtttaagtaagttaaaaatttagtagagaagatttaaattttaaggttggagaataattttttttgattttatgtatagtattttgtgtatattgggggatggggtattttaggaggttttaaggtattttggtgtttttagtttttttaggtaggtattgtatgttgttggtggttttattgttttggggttttggtggtagtttggtttttatagttgtattaggtattgtttttaggggggttttatgtaataattttagttttattgttttatttcgtattgttttagtggaagttttttgtagtagttttatttttagatagtttaatatattttttaaaatttaggtggaggttgttaggtttttatagtttttgtattttatgtatttgtagaattagtattatatggatattgttatggtttattatttgtatattttagagttgtaggttaatttgtatttgtggttgtttgaattatagttgggggcgttgaggagtagtgtgttggaacgtagggagtagagatttaaagtagttttgggtagtagtttattttcggaattattttgtttttttagagtttagggtttatgaggaaggggtagttttaaagattttagaaatgtttttggggtttttaattttattgttatggatagtttttggttttattttatttatggtgatttttttagtaattttttgattatatttaaatattttttttattgttaaggtggttaggttttaaattttttaatgtttttttattttgtttttttttatattttattataagtagttaaaagaagttatttagtagtttaaatattttgttgtttagatattttttttattagatattttagtttattattgttaagttttgtattttataaagttttaggatatggatagaatttagttaaggttttagttagtttatagtagcgatggtttttattttagtttttaatattttgttttttatttttatttgggattttatcggaatggttttttttatttatatttttattagtattttgattatgattatttaaatgatttttaaggagttttagatttttttt

SEQ ID NO: 2087 - DNA, 5476 bp, Artificial Sequence
  chemically treated genomic DNA (Homo sapiens)
ttgtttttatgtttgagggaaaaaaagttgagatattgtatgaaagatgatgtaggatatacgttgattttttggttttaatgagttatttgaatattgttttgtttattgttagttttttttattatttattatatggttaatttttgaatttttgtaatatgaaattttattttattttttaatttattgttatttaaagttagtaagtttagattatatggttatttaaaaaaaaaaaaaaaaagaaaagaaaaagaaattttttatagttttatttattaaataagtaaattttaataataagtatttgtgttttggtaatttatagtggatgtttagaaaagtaatatataaagagaaatgtttatgttatttgtttagttatgggatgtgtgtgtttgtcgagtatttttttaatttggaatttggtagaatatcgttatttttattgttttatttttttacgtcgatttttatagtaattgtttgtttagtgattgttataatttagtttggtagagagagggaagatattttataaagtaaggtaacgttaatgttgagattatgaatggttttgagtagagtagagtattattgttttttttaaaatttagaaggatttgatggtgttttgtgagtttatgggggtgttttcgtgtaggttggaaattatagttgtgcgtttttttcgtttttttttttgattagtagaagggtattttttttggtttgtacgtcgttgggttatataatattggttgtcgttgtataaagttacggttattagcgtttttttgaggttatttgtttttagttatggtgtttataggattttttttttattttgtaattttagttaaattagagtatgtgatttggtttagatgttaatataattgttgttatgtgtttttttttttttttgtgtttgtgataggtttaatttaatttgagaaggttgtagattttcggggttggtgtaaaaatattttattttgatttgagaaggcggttagttttttttttcgttgtcgttggttgttagtatttattttttgtggatgtgaaaattttagaagggttgggttttttttttgggtattttttaggtttatttttagagtggggtttagtatgggaggattgtattttatttatttttttgatgtggggtttggatttatagttcgatagtatttatggaatgtgggtagaagcgatagtagttagtttcgttttggttttagggcggtacgtgttttgtttgtgttttgggagtttttattttttatattgtgggaagagggtgtttagggagttgtagtttttttagtttagttttaggacgaggtttaggtagtagagttattttagtagatttggtagtgtgagagaaatgtatgtgtatatattgagtttgtaggtggttgttatatggtagtattgattgatatagatagaaaagagatttacgagggagaagtgagagtgttggagattttataagttataggttgtaggggtaggatggttttttagaaggtgaaatgattgttttgggaatttattagaggaagatatagaggttttagacggttgaaggtttaatagtgattttagacgggttttatgttagattaggtttttttagggttgtgttgtttttattaaagttcgttttgagggtagttatatagtaggtagtattcgttatttgtataagcgaggtttaagttttagttttttttttggtaggtagaggaagtaggggtattatgtttgggagtttttgaaagtagatggggtagtatttggttaagagttaggaggggatgatagattagaggggaattttcgttttacgtgttgagtatacgtagggggttgggtatttgttttgtgagttataattggtgtttttgtgtttcgtcggaagttgtattaggtagttttttggtggaggatagtggtcgttttttagttttattttttttttcgtgatgggtcgttgttagatgtgtgtttaggaaaggtaaatattaaaggtagaggattagtttttatatcgaatatttcggtggttttgtttgggggttgggttttgacgtgttggaggttgttttagatttagagattaaaaatagggaagaattattgttgaaatttttggaaaagtttgtaatggggtttttggtagtttgaggagtggtggtgtttttatttggtagacgtcgttttaataggagggatagatgagtgtattagtgttgttagttagaggcgtttgttggcgtgtttttatggaatggggtgttagttttgtggagggtggtttatttttttgtttttagtttttattgggtttgttttttgttttatggttagttggttagatcgagtatttttttgattttcgattttggtttttgttgatttttgtcgttgaggttttttgtagattttatttgtatttattttttgtagtttttatatttgaatttcgtttggatttttgttaagttttttaggttttttttttttagggggattatagatgttacgtgtagggttgtttttggagggttagtatagttttttttaagtgggtaagatttaggggtggtttaaaagatagttgtgttttagttttggaatttttgaatgttgatttttgtagtaaaaaaggatttgtagatgtgagtaaaggttgttgagataaggatattttttttgttttttgggaggattttaaatgtaggtgtatagattttaagaagaagaggtagagattggggtgatgtagttataattaaggaaagttaaggattgttggtagtttgtagaaattggagggtaaggagtattttttaatcgttcggagtttttaggaggcgtaaggttttattgattttttgattttagacgtttagttttcggaattttgagaggatttatttttgttattttaagtaattaaatttgtggtagttttattagttttaggaaatgaatacgaatggaaagttaaagattttaagaaatgagtggcggggtgcggtggtttatatttgtaattttagtatttgcgggaagattgtttgggtttaggatttggagattttgtgtttgtgagaaatttaaaaaataggttgggtgcgatggtttacgtttgtaattttagtattttgggaggtcgaggtaggcggattataaggttacgagtttgagattagtgtgattaatatggtgaaattttgtttttattaaaaatataaaaattagtcgggtgtggtggtgcgtgtttgtaattttagttattcgggaggttgaggtagaagaattgtttgaatttaggaagtagaggttgtagtgagtcgagatagtattattgtattttaggttgggtagtagagtaagatttcgttttaaaaaaaaaaaaaaaaaaaaaaaaaaaaaaaaaaattgagtatggtagtatgtatttgtggttttggttacgtcggaggattgtttgaagttaggagtttaagattagtttggataaaagagtaagattttatttttattaaaaaaatttaaaaattagttaggtatggtgtcgtatttatagttttagttatttaggaggttgaggagggaggattatttgagttttggcggttgaggttataatgagttatgattgtgttattgtattttagttttggtaatatagtgtgagattttgttttaaaaataataaaaatttaaaataaaagaattaagaaattattggatttgaggtttggtttttagttgttgttttgtttttgtgatttggttattcgggattttttgggtttaaatatatagtttattgtttattttaagaaggttttttattgtttggttggtaattggggtgggttttgtaggttttatttgttttggttttacggcgttggtgttgtaggtttttattattgtttgtttcgagttttttagttttttgtagagttgtttgtatttgatggcgatgaattaggaaggtaggcgtgttttgggttatagagtagttatggttgttagttattagggggttttatttgtaattttggatgtggttttggtttttttgtttaaagtgattttggggtttttagataagagatagggagattggagtttagttttattttttcgtatatatttggtttatttttgttttattttggaagatgggggttattatacgtgtaagggatacgggataggaatttttggttttgttattagatattttaaaattaagtgtaaacgtgattattaggtgtagtttttatagtagtaagaaatttgtgtttatagaaagaaatacgtgttagtaatttatttatgcggaaagttatatagagttattgttttttgtatttttaggtgacggtttatatttgttttagggaaggttatagttgtttgaatttttaaaatttttagatacgtattgtttgtgtaggattcggagtttagtagtattgttagggttttgaagtgtttttttagagatttttttttatagattatttttttttttttaagtagtaaaaggagaaaattgttattaaaggatattttagatttttgatagtattttcgttatttttgaggatattattattattttaggtgagtattaggtggagtgtttttgggtgattggtcggtttggagtagggagggaggtttagagttttattttttagtagcgagtgaggcggaggttttagcgtttttttcgggcgggttttttggtggatggaggagtgattcggggttttttacgtggtgttagttgtttggttttttggacgttgtaggaaagggtttttttcgtttgcgtttttttgattttgagttttattagtttttgttagttgggttttagaaggttggagtgttgtggtagggatgacgttttatttttgttatgtttttgtgttttgtgtttttttaggatgaggggtatgaagttgttgggggcgttgttggtattggcggttttattgtagggggtcgtgtttttgaagatcgtagtttttaatatttagatatttggggagattaagatgtttaatgttattttcgttagttatattgtgtaggtgaggttagggtagtttttttttaaaagtagaggagttttggagtttagggttggtgggtagggttagttttatggagttatagggtgtcgggtgtggggtattgagtattattgtttttagtacggtggaataggtttttggttgtggattaaggtttttatttttgttgtgttgtttttggttggtagtaggagtttaggtagaaatatgaggttgcggttaaatcgagtaatgttacgagtattagttgtggttttttttgtggcgttgtagggtttttgggtggtattagttttgtttagtattattgtggttttgtttttaga

SEQ ID NO: 2088 - DNA, 5476 bp, Artificial Sequence
  chemically treated genomic DNA (Homo sapiens)
tttgggggtagggttatagtggtgttgagtagggttggtgttatttagggattttatagcgttataaagggagttatagttgatgttcgtggtattgttcggtttaatcgtagttttatgtttttgtttgggtttttgttgttagttagggatagtatagtagggatgaggattttggtttatagttaagagtttgttttatcgtgttgggagtagtggtgtttagtattttatattcgatattttgtggttttatagggttggttttgtttattagttttagattttagagtttttttgtttttggggggaggttgttttggttttatttgtataatgtagttgacgagggtggtattggatattttggtttttttaaatgtttggatgttgaaggttgcgatttttagggatacggttttttgtagtagggtcgttagtgttagtagcgtttttagtagttttatgttttttattttgggagagtatagggtatagagatataatagaagtgagacgttatttttgttatagtattttagttttttggagtttagttggtaggggttggtggagtttaaggttagggggacgtaggcgggggaaatttttttttataacgtttagaaagttaaatagttggtattacgtagaggatttcgagttatttttttatttattagaaaattcgttcgggagggacgttggagttttcgttttattcgttgttggaggatgagattttaagtttttttttttgttttaaatcggttagttatttagaggtattttatttggtgtttatttgagatgatggtgatgtttttagagatgacgagaatgttgttaagaatttggaatattttttgatgataattttttttttttgttgtttaaagaaaaaaaagtagtttatgaagaaaggtttttgaagaagtattttaaggttttggtagtgttgttgggtttcggattttgtataggtagtgcgtgtttgggagttttaaaagtttaggtagttgtgattttttttggggtaaatgtgagtcgttatttgagagtgtagaaaataatggttttgtgtggtttttcgtataggtgggttgttagtacgtgtttttttttgtaagtataggttttttgttgttgtaaaaattgtatttgataattacgtttgtatttagttttaaaatgtttgataataaggttaaaggtttttatttcgtgttttttgtacgtgtggtggtttttattttttaggatagggtagggatgggttaggtatgtgcgggagggtggggttgggttttagtttttttgttttttgtttgggggttttaaggttattttggataaagaggttaaagttatatttaaagttgtaaatggagttttttggtggttgatagttatgattgttttgtggtttaggatacgtttgtttttttgatttatcgttattaggtgtaggtaattttgtaggaggttggggagttcggaataagtagtggtgggggtttgtagtattagcgtcgtggggttaggataggtggggtttgtaaagtttattttaattgttagttaagtagtggggagtttttttgaggtagataataggttgtgtgtttaggtttaggggatttcgagtgattaggttataagggtagggtagtagttaaaggttaggttttaggtttagtaattttttggtttttttgttttgggtttttattgtttttgagatagggttttatattgtgttgttaaggttggagtgtagtggtataattatggtttattatagttttaatcgttagggtttagataattttttttttttagttttttgagtagttaagattatgggtacggtattatgtttggttaatttttaaatttttttggtagagatggggttttgtttttttgtttagattggttttgaatttttggttttaggtaatttttcggcgtagttaggattataggtgtatgttattatgtttagtttttttttttttttttttttttttttttttttttgaggcggaattttgttttgttgtttagtttggagtgtagtaatattatttcggtttattgtaatttttgttttttgggtttaagtaatttttttgttttagtttttcgagtagttgggattataggtacgtattattatattcggttaatttttgtatttttagtagagatagggttttattatgttggttatattggttttaaattcgtgattttgtgattcgtttgtttcggttttttaaagtgttgggattataggcgtgagttatcgtatttagtttattttttaagttttttatagatataaggtttttaagttttgagtttaagtaattttttcgtaaatgttgggattataagtgtgagttatcgtatttcgttatttattttttggaatttttgattttttattcgtatttattttttgagattggtgaaattattataagtttggttgtttaaaataatagaaatggatttttttaaaatttcggagattggacgtttgaagttagggagttagtaggattttgcgttttttggaggtttcgggcggttgggggatgttttttgttttttagtttttgtaggttgttagtaatttttggttttttttagttgtggttgtattattttagtttttgttttttttttttaagatttgtgtatttgtatttggggtttttttagagagtagggaggatgtttttattttaatagtttttatttatatttgtaagtttttttttgttataaaaattaatatttagaggttttagggttagggtatagttattttttgagttatttttgggttttgtttatttggaaggggttgtgttggttttttaaggatagttttgtacgtagtatttgtggtttttttgggggaggagggtttggaaggtttggtagaagtttaggcgggatttaggtatgagaattgtaggaaatgaatataaatggggtttgtaggaggttttaacggtaagagttagtaggggttaaggtcgaaagttaggaaagtgttcggtttggttagttggttatgaagtagaaggtaggtttagtggggattagaaataggaaggtaaattattttttataagattggtattttattttataaagatacgttaatagacgtttttggttggtagtattggtgtatttatttgttttttttattgagacggcgtttattagatggaaatattattattttttaggttgttagaggttttattgtaggtttttttaaaggttttagtaatggtttttttttgtttttaatttttaagtttaggatagtttttagtacgttaaaatttagtttttaagtaaggttatcggagtattcggtgtagggattagttttttgtttttggtgtttgttttttttggatatatatttgatagcgatttattacggggaagggagtaaagttagagggcggttattgttttttattaagaaattgtttggtgtagttttcggcggggtatagggatattaattatagtttatagagtaagtgtttaattttttacgtgtgtttagtacgtgggacgagggtttttttttggtttgttatttttttttggtttttgattaaatgttgttttatttgtttttaggaatttttaggtatagtgtttttgttttttttatttgttagaaggaaggttggaatttgggtttcgtttgtataaatggcgagtgttgtttgttgtgtggttgtttttaggacgggttttggtgagggtagtatagttttggaggagtttggtttgatatggggttcgtttgggattattgttgggtttttaatcgtttggagtttttatgtttttttttgatagatttttagaataattattttattttttaagaagttattttgtttttgtagtttgtggtttgtggagtttttagtatttttatttttttttcgtggattttttttttgtttgtgttagttaatgttgttatgtaatagttatttgtaaatttagtgtatatatatgtattttttttatattgttaggtttgttggggtggttttgttgtttgggtttcgttttggggttgggttggagagattgtagttttttgggtattttttttttatagtgtggaaggtggaggtttttagggtataagtagaatacgtgtcgttttaaggttaaggcggagttggttgttgtcgtttttgtttatattttatgggtgttgtcgagttgtaggtttaagttttatattaggggagtgagtggggtataatttttttatgttgggttttattttggagataggtttggggaatgtttaagaaggaagtttagtttttttgggatttttatatttatagagaatgggtgttggtagttaacggtaacgaggagaaaagttgatcgtttttttagattaggatgaggtgtttttatattaatttcgaggatttgtagtttttttaggttaaattaaatttgttatagatataggaagggaaaagagtatataataataattatattgatatttaagttaggttatatgttttgatttggttgaaattataggataaaggaaaaattttataggtattatggttggaaataaatggttttaaaggaacgttggtggtcgtggttttgtgtaacgatagttagtgttgtgtgatttagcgacgtgtaggttagggagggtatttttttattgattaagagggaaagcgggaaggacgtatagttgtggtttttaatttgtacggaggtatttttatgaatttatagagtattattagatttttttgaattttgaaggaagtaatgatattttgttttgtttaaggttatttatggttttaatattaacgttattttgttttatagggtattttttttttttttgttaggttgggttgtggtagttattgaataagtaattattgtgaaggtcgacgtggaaaaatgaggtaatgagggtggcggtgttttattagattttaagttgaagaggtgttcgataggtatatatattttatgattaaataaataatatgaatatttttttttatgtattatttttttagatatttattataagttgttaggatataaatgtttattattggggtttatttatttaataaatggaattgtgggggattttttttttttttttttttttttttttttttgaatgattatataatttggatttattaattttaggtaatagtaagttaaaagatagaataaggttttatattataggaatttaaaaattgattatataataaatgatgaagaaaattaataataaataggataatgtttaaatagtttattggggttaaaagattagcgtatattttgtattattttttatgtaatgttttagtttttttttttttaaatataaaggtag

SEQ ID NO: 2089 - DNA, 7046 bp, Artificial Sequence
  chemically treated genomic DNA (Homo sapiens)
aggtattcgttaaaaattttttgggatgtgaattttttgtttttttagattttggatgtcggaatatttgttttttgagatgtatttgtaggagtatttttgtgtggaatatttgaaagttattttgaaagtaaaggttagagataggaattgaaatagggtttaatttttaaataagaaggtataagatattgtagttgatggaattgtggtgagtatgttttttaagggtggtgagtatgtttgtgtgggtatagaagatatatgtacgaatatttttattttattttatttagatggagttttatttttgttgtttaggttggagtgtagtggcgtaatttcggtttattataatttttgtttttcgggtttaatgatttttttgttttagttttttgagtagttgggattataggtatgcgttattatgtttggttaattttgaatttttagtagatatgggatttttttatgttggttagggtggtttcgaatttttgattttaggtgatttatttgtttcggtttcgggattataagtgtgagttattatgtttagttaaatatttttatttttaatagtttaatgaatgtataatgattaaatgtttagtatgtattaaattatgattttatgtagtttttttaattatattaattatgattttatatggattatttaagtatattaattataattttatgtatattattgtttaagatagtaatgatataaaatttttttaaaattatttatgtaaaagaaataagttagttaaaaggaaaatattaagtaaaaatgtataggtggtatttaaatatggtaaaaattgtgaagtagtttaatgaataattgaattttgggaaatgttagattagagaattggaaatatttttttaaataaatatttgttatttatgattattttatggatgagtgtttaagaaatagagatgtatatgttgtatgtttttaaaatgtataggatgaatttatattgattattatattttttgtgttaaattaattattattttttggattatagggagaagttgtgtttttttatagtttttggagatgtgtgatgtgttataggtttaataattatattatatatttttttataaaagtgttatatagagtagaaatgtataatagttattaatttaagattaaattaggtttagtggtgtggatagttttattttgtttatgataaaatatttttttattttttgtgtgatttttaagtaatttaacgattgttagttttgttgagttaaatgtaatattttatattaaatttattggtttggtaaagttataaattttattacgtaaaagttgagaaaggaaagttggagaatgttaaaaatagtataatttgttattgtgtagtatttgtattgggggtttagtatgttttatttatagatatttattaatatagagatatagaaagaaatatataaaaaatagttttattaaatattttttagtatttaagtgtagttttaaaagtaagaataggttaggagtggtggtttacgtttgtaattatagtattgtgggaggttaaggtaagaggattgtttgaggttaggattttaagattagtttaggtaatatagtgagatttttatttttacgaaaaaattttaaaatttagttgggtatggtggtttgagtttgttgttttagttatttaggaggttgaagtaggagtgttatttgagtttaggaggttgaggttgtagtgagttataattgtattattgtattttagttttggagatagagtgagattttgtttttaaaaaaattaaaattgagaaaaaaaaaaaaggtaagaatagttatagtaaattttttattggggaaaaaaaaaaatttttttttttatatttttttttttttttttttttttttttgagagtgattgtggttaaaaggagtattttttttttgtagttttttgaggggtggggtggggttatgaagttattttttatatttatttttttgtttagttttttttatttttagttttttttttcgtatttttgtttagtagtgttttaagtggaggaggggtgggggtattaagtttgtaaaattggtttgttggggttttttttttttttttattttttgatttttgggaaaatgttttgttgggaggttgtttggtagtgttttagttgttttttgtgggtttgaatggggtttttttttgtttttataggaggaaaagggagttgttgttagagggagaaatggagagatggatagagaaggtaggtgttatttttcgtttttgatatataaagaaaaagatacggaaatttttttttttttttttttttttttattttttttttttttttttttttttttttttttttttttttatatatatatatatatatatatatatatatatatatatataggcgcgcgcgcgcgcgcgtaggtatacgttttgtaaatttaggatttaaagagataggggtattattatatttggtacggtggggtttttttaggtttgaaattttgtatttttttttattatttatttttttcgagttcgagaagggttaggtgtgggcggatggttggttacgttttgtgtttttaatttatatttacgggatgatatagacggggcgtggtgagtgttgttggaggcgtttgggtagttttattttgttttatttttttatttgaaggttgggcgttgttggaatttgtaggggtagttttagtaaggtggggtggcgtggagtggggtgggagaagggattttagttgaagtagaatttaggttggatttgagaatattggggagggtatgggcggtggttttcgggtaggggttttgagaatatgttggttttgattgttgttagtgtttggttaaagttgttaaaaggttaaaaaaaaaaaagtagggggagtttttgttaagatatattttttaggttatttttttttcgcgggagtgttgggggggaggcgttgtttggaatttgtgaatgtgatattagtttttttttttttttttaaggtcggttttggagagggaggttagggtatttttgtttggtataggcggtagcgttggttttcggtttagtgtcgtttgtttttcgggagttgtggtttttttgggtttcggggttaggttgaggtaagcgtatagcggaggttaggggtttcggtagaggttttggggatagggtggaggtatttttgggtgtgggtgtgggtgtgggtgtgggagggagagtttttgttttttttttttttatttttaatttttgttttagtggtttttttagaggatgtatgttattatggatttgtcgttgttattgtttttgtttttttagttgtgatttcgagggaggtttggggatttgagtttgtttaaatttacggttttgttgttgggataaaaattgtttttttgattttagaaggaggagggaaaaaaggttttttagtatgtgtgttgtgttagttttggaaatttattcgtgtttgaattttattttttatttttagaaaaattggagtaaaataaaaagaggagatggataaagtgtgtatttgatggtattttttgggaagagattttaaatttattttataggttttattgggttattgtgagcgttttggtggagaataaataaaaattttgggtgtttagttgtttaatttgaaaaatgggattagcggaaaaagttaatgtgttttatgtattttttgttttttttattaaggtatgatgttatttgtatagtaattgttttgtgtgtattttagggggggattttaaggttagatagataggaaattgttttgaaaatgtaaatatattattaaatgtgaagtattatttgattttttgttcgaatggtattttttttttagtattattttttttgtatatttatttaattttgtataagaatatttttttgttttaaatgaagatatttttttaaaaaaaagagttttagaaaatatgtttttgtttgtgcggggaataaatagaatattttgaggtgtattttttttttttatgttaggtaatattttttgatttttttcggtttttaagttaggttgcgtttttttttgttatttagaagggtttttttttttgttttagtaaaatattagtttttgtagttttttatttttttttggtgtttttttttcgttatgttttaagattggtggtatcgattaattttaagatttaagttttgtgtgaaaaatatttttgttttttaattagtttattagtttttttcgtaggggaagtgtggatatataaaagaatttatcggggttttttattagtgatagggaaaagattgggtatgtgtttaaacgagttttgatgttatttttaagtttttttttttgttaattttttacggattttttttcgatagatgtaaagaattttagtaaaaaagattcgtaggaaggggtttgaagagaaaagtacgttgatttgttaaaatagtttgatttttagtagtggggtagtgacgagggagagtatttttttgtttgattgagattagaatcggagagatataaaaggaaaatgaagcgagtaataattaaaaaaaatttttcgtatataataatataatttatttaaattgtggtttatattttttatattaatggtatgattttttttttggagtttttttttttgatttttgaatttcggggttggtagtttgtaaaggggaagcggattttagtattgtacgggtaggtttagtaaaggtttttaatgggtatttttttttttttagttttgttttcgaattgttagacggcgggcgtttgtttttgaagttagtagtgattttttttcgggtttggttttattttcggttgtacgttgtttgttggtgattaataatataataatattgtttggggttggaataaagtcggagttgtttatttttattttaataggggtttaatataaaaagtcggtagagagttgtttaagttagacgcgtttttgtatttgcgttaggcgaacgggttttgcgttttttgtagttttagttttttatcgtcgcgtgcgtttgtagacgtttcgttcgttgtttttttttttggtaggcgttgtttttttttttcgttaaaagggtatttgggttgaaggatcgttttgagatttgaggaattcgtagcgttttgagggatttgaagttgttttttttcgtttttttttgggtttagtttgaacgggaggtttttgattttttttttttagaatggattatttgtttatgattttttttttgttgtttgtggtttgttaaggagttttagaaataggtaggtacgttcgttgatttgtaagtttcggaattataagttagtgtgtttttatttatttttatgttttttttgtttttattttttttcgttttttttatgattgtagtttagagagtaagtgtttgagaattattgttgaaagttattttaagttttttagtgtaaaatgtaaaatttttttattgaatataattaggtgtaattgattataatatgatattaaaataatttatcgttttattattattattttattatgtgtttttttggtttttaaaaaatgagaagagtatggatatatataatttagttaaatgtatgtttgtaatatatgtgtttatataggtatataggttatataggaatttaaattttatttaaatattattttaatagtgtgttaacgtgtaaaatatttaagtattttagtttgaagttaaggaattgtatttagtcgtttaagtaatgtatgtttagtaaaattatttgtagagtaaaagtttgttgattaattatcgttttttttttttttcgttattatttttcgtaggcggtttttgggtgaagtagatgttttttttaaaatttgttattattgattttaggttttttttggtaggtttttggtatttaaaatagtgtgagttttttttttagttttatttatttgtgttgggaggggagttaggataatttttggttgtcgaaggatttaggtagtgcgtgtgtatttgttcgggtttttttcgtttttagggttagtgtattttttttgttttttcgtgattttgattaaagagaaaggatgttaagggaatgaaaattttggaatgtgtttgattatttgaaatgtataaaattgggtagataagttgtatggttaaattgttaggaggaagaggtaaggtagtagtggagaagggggaggtagtggattttatataagtttgatgtttagggattcggaatttaaaatttttttagtttatttttagttttttgatttgttttttagttttattttaggttattggtttttatggagttatttttttgaattgaatattgaatagttaatttttttttttaattattttttttatttaattttgaaagatatatattatttggggtattttgtgttttatatagtatgtgaagtggatgggtattttttaaagagagggttattttgaatggggaagtggttttaaagttaggaataattgtgattttttgtttttagttatgtgttaatgttaagtaagttttagtggatagtgttgttttattaagttttttgtagaagttagtcggatttttaataggtagtattttatagtatttttttgagtttgttttaagaggggtgggggaagtttttttttaggtgtttattttttttgtatttgtgtaatttttttgaaggtggataagttaagggtatgagggggaggtaaaaggtgaatttatgttaaggagggaaaaaaataaagagtttttttttttgtgttttttgttgatggtaggttgtgtgttttatttgtttttatttgttttgttagttttgattttattgtgatttagtatgtttttcggcgtttgaggagatattttttattgatttgttttttttttttttagt

SEQ ID NO: 2090 - DNA, 7046 bp, Artificial Sequence
  chemically treated genomic DNA (Homo sapiens)
gttggggagagaaagagtaggttagtgggggatgtttttttaaacgtcgagagatatgttggattatagtagagttagagttagtagagtagataaaagtagatgaagtatatagtttgttattagtaagaaatatagaaaaaagggttttttatttttttttttttttaatatgagtttattttttgttttttttttatgtttttggtttatttatttttagggagattatataaatgtagaggagataaatatttgaaaagggattttttttattttttttgaagtaggtttagggaaatgttgtggaatgttgtttgttgaaaattcggttggtttttataaggaatttggtaggatagtattatttattgaagtttatttaatattggtatatgattaaagataagaaattatagttatttttagttttggggttatttttttatttaggatgattttttttttagggggtatttatttattttatatgttgtgtagggtatagggtattttagatgatgtatattttttaaaattaggtggggaaaatgattggagagagaaattaattatttaatatttaatttaggagggtaattttatagaaattagtgatttaaggtggggttgagaagtaggttaggggattgaaggtaggttggggggattttgaatttcgaatttttgggtattaggtttgtgtgggatttattgttttttttttttttattattgttttgttttttttttttaataatttagttatgtagtttatttgtttaattttgtatattttaaatgattagatatattttaggatttttatttttttgatattttttttttttagttagggttacgaaaagataaaaaaagtgtattgattttaaaaacgggggggattcgggtagatgtatacgtattgtttaaatttttcggtagttaagaattattttagttttttttttagtataggtgaataaagttgaaaagagagtttatattgttttgggtgttaaaaatttgttaaaagaaatttaaagttaatgatgataaattttaaagaaaatatttgttttatttagaaatcgtttgcggggggtggtggcggggggggggggaggcggtagttagttaatagatttttgttttgtaggtgattttattgaatatatattgtttgaacgattggatataattttttggttttaagttggaatgtttaaatattttatacgttaatatattattaaaatagtgtttaaataagatttaagtttttatatggtttgtgtatttgtataaatatatatattataaatatatatttgattaaattgtatatgtttatattttttttattttttaaaagttaaggaaatatataatggaataataataataaaacgataagttattttaatgttatgttatagttaattgtatttaattgtatttaatagaggaattttatattttatattagaagatttaaagtagtttttagtaataatttttagatatttgttttttaagttgtagttataaaaagaacggggaaaaatagaagtaagaaaagtatgaaggtggataagaatatattaatttgtaatttcgagatttataagttaacgagcgtgtttatttgtttttggagttttttggtaagttataaatagtagagagaaaattatgagtaaataatttattttgaaaaaaagggattaaaaatttttcgtttaaattgaatttaaaggaaaacgaagaaaaatagttttaggttttttaaagcgttgcgggttttttagattttaaagcgattttttagtttaagtgtttttttaacggggagaaaaggtagcgtttgttaggagagaaggtagcgagcggagcgtttgtaggcgtacgcggcggtggagagttgggattgtaggaggcgtaggattcgttcgtttggcgtagatgtagaggcgcgtttgatttggatagttttttgtcggttttttatattgaatttttattagagtgggggtaaatagtttcgattttattttagttttagataatgttattgtgttattagttattaataggtaacgtgtagtcggagataaggttaggttcgaaaggaaattattgttaattttagaggtagacgttcgtcgtttgataattcgggggtagggttaagaaaaagaaaatatttattagagatttttgttaaatttgttcgtgtagtgttggagttcgttttttttttgtaagttgttagtttcggagtttaagaattagaagaggggattttagaaaaaaagttatattattggtatgaaaagtatgagttatagtttaaatagattgtattgttgtgtgcggggaattttttttaattgttgttcgttttattttttttttatgttttttcgattttagttttagttaaataagggaatgttttttttcgttattgttttattattgggggttagattattttggtagattaacgtatttttttttttaagtttttttttgcgggttttttttgttgaagttttttgtatttatcggagaaagattcgtgagggattggtaagaaagggagtttaaaaataatattagagttcgtttaggtatatgtttagttttttttttattattgatgagaagtttcgataagtttttttgtgtgtttatattttttttgcggaggaggttgataaattgattgaaaagtaaaggtgttttttatatagaatttaaattttaagattggtcggtgttattaattttaagatatggcgggagaagaatattagggggagatgaagagttataggggttgatgttttattaggataaaaaggaaaatttttttaaatggtagaaaaaaacgtaatttggtttgggggtcgaggagggttaaggaatgttgtttaatataggaaggaggaatgtattttagaatattttatttatttttcgtataagtagggatatattttttgggatttttttttttgggggggtgtttttatttagggtaaaaaggtgtttttgtataaggttaagtgaatatgtaaggaaggtggtgttgagaaggaaatgttattcgaataaggaattagataatattttatatttaataatgtgtttatatttttaaaataattttttgtttatttaattttgaaatttttttttgaagtatatatagggtagttattgtataggtgatattatgttttaataaagaaagtaaaaggtgtatggaatatattggtttttttcgttagttttattttttaggttagataattgagtatttagaatttttgtttgttttttattaaagcgtttatagtggtttagtaagatttatgggataaatttagagtttttttttaggggatgttattaaatatatattttgtttattttttttttttgttttattttagtttttttggggatggagggtggaatttaagtacggatgaatttttaagattggtataatatatatgttgggaaatttttttttttttttttttttaaaattaaaaggatagtttttattttaatagtaaagtcgtgggtttggatagatttagatttttagatttttttcgaagttatagttgggggaatagggatagtggtagcgataggtttataatgatatgtattttttaaaagagttattgaagtaagagttggagatgggagagagagaggtaagaatttttttttttatatttatatttatatttatatttagagatgtttttattttatttttagggtttttgtcggggtttttggttttcgttgtgcgtttattttagtttagtttcggggtttagggaggttatagttttcggaggataggcggtattgagtcggaagttagcgttgtcgtttgtgttaggtaagggtgttttgatttttttttttaaagtcgattttgggagaggagaggagagttgatgttatatttataggttttaagtagcgttttttttttaatattttcgcggaagaaaggtggtttgggaaatatgttttggtagggattttttttatttttttttttttaattttttggtaattttgattaaatattgataatagttaggattaatatgtttttaaggtttttattcggaaattatcgtttatgttttttttaatatttttaggtttagtttgggttttattttagttggagtttttttttttattttattttacgttattttattttgttgaggttgtttttgtaggttttagtaacgtttagtttttaggtggagaagtggggtaaaatgaaattgtttaagcgtttttaatagtatttattacgtttcgtttgtgttatttcgtgaatatgaattggaaatataaaacgtggttagttattcgtttatatttggtttttttcgagttcggggaaagtaaatagtaaggaagaatgtaggattttagatttggaagggttttatcgtgttaaatataatggtgtttttgtttttttgaattttgaatttgtaagacgtgtgtttgcgcgcgcgcgcgcgcgtttgtgtgtgtgtgtgtgtgtgtgtgtgtgtgtgtgtgtgtgtgagagagagagagagagagagagagggagagagagagagataggagaagagaagagagagagagaattttcgtgtttttttttttgtgtgttaggggcgaggggtggtatttgttttttttgtttatttttttatttttttttttggtagtagtttttttttttttttgtaggggtagagggaagttttatttaagtttatagaaggtagttagggtattgttaggtagttttttagtaagatatttttttaagaattaagaaatgaggggagaaggagaattttaataaattagttttataagtttgatgtttttattttttttttatttaaggtattgttagatagagatgcggggagaagaattagaggtgaaaagagttggataaaggagtgaatatgaaggatagttttatagttttattttattttttagaggattgtagggggaaaatgttttttttggttatagttatttttagaaagggaagggaaggaagggagagatgtaaagaggaggatttttttttttttttaatagaaagtttgttgtggttgtttttgtttttttttttttttttaattttaatttttttggggatagggttttattttgtttttaaggttggagtgtagtggtgtagttatagtttattgtagttttaattttttgggtttaagtgatatttttattttagttttttgagtagttgggataataggtttaagttattatgtttagttaagttttaaaattttttcgtagagatagggattttattatgttgtttaggttggttttgaaattttggttttaagtaatttttttattttggttttttatagtgttgtgattataggcgtgagttattatttttggtttatttttgtttttgaggttatatttgaatgttggaaagtatttgataaaattattttttatgtatttttttttgtatttttgtattaatagatatttataaataaaatatgttgagtttttaatatagatattatatagtagtaaattgtattgtttttagtattttttagttttttttttttaatttttgcgtaataaaatttgtaattttgttaagttaataaatttggtatgagatgttgtatttagtttagtaaagttaatagtcgttaagttgtttgaaaattatataaagaatgaggaagtattttattataggtaaagtgaagttatttatattattaggtttgatttagttttgggttggtaattattatatatttttattttatgtagtatttttgtgaaaaaatgtgtaatatagttattaggtttgtgatatattatatatttttaggagttatgaagaaatatagtttttttttatagtttaaaaaataatggttgatttagtataggaaatatgatggttaatgtaaatttattttgtatattttaaaaatatataatatatgtatttttattttttggatatttatttataggataattatagatagtaagtgtttatttaaaagagtatttttaattttttaatttagtattttttaaagtttagttatttattaaattgttttataatttttattatatttgggtgttatttgtatatttttatttaatattttttttttaattgatttgttttttttatatgaataattttaagaaaattttatattattattattttaagtaataatgtatatgaaattatggttggtatgtttaaataatttatatgaaattatggttggtatggttaaaaaaattatatgaaattatagtttaatatatgttaaatatttaattattatatatttattaagttattaaaaataaaaatgtttggttgggtatggtggtttatatttgtaatttcgaggtcgaggtaagtggattatttgaggttaggagttcgagattattttgattaatatggagaaattttatgtttattaaaaatttaaaattagttaggtatggtggcgtatgtttgtaattttagttatttaagaggttgaggtaggagaattattgaattcgggaggtagaggttgtggtgagtcgagattgcgttattgtattttagtttgggtaataagagtgaaattttatttaaataaaataaaataaaaatgttcgtatatgtattttttatgtttatatagatatgtttattatttttggggaatatgtttattatagttttattaattgtaatattttatatttttttgtttaagaattaagttttgttttaatttttgtttttgatttttatttttaagataatttttaaatattttatataaaaatgtttttatagatgtattttaaaaaatagatgtttcggtatttagaatttagaaaaataaaaggtttatattttaaaaagtttttaacggatattt

SEQ ID NO: 2091 - DNA, 11812 bp, Artificial Sequence
  chemically treated genomic DNA (Homo sapiens)
tgtaagttttttttagagaatgttgttttttttttttttgtattttttggatttagaatagtgtttagtatgttgtaagtatttagtttaaattgaataaattaataattattatttataagattgaaagtttttgtggttacggattaatatttattgattatatatttttagtaatatttagtttagtattttgtatgtggtaaaagtttagaatgtttgttaaatagaattgtattttatttttttttgttttttaaagatgttttttgtttttttttggaaagtttttatattgttatttgtttttttattttttatgttttattttatttttgtttttttttttgtttatattttattataattttttgggattttaggaaattttaaattataattgttattttttaatttttagaggttatatagattatgttttataatttagtagtttatattaatatgtattttttgttttatgggtatttatttttgtttttttaataatattgtaaatggtataatggtagagattatataatatttttatattattgaaaatatataaggtgatatgtattgtaagtaatcgataattatattaatttatttagaatagtatttttatttgtttattagatatgattatttagatatttaatagagattttattttgtttgaaatagaattttttgtttaagtatttatgtatatttttttgttattttattttatatattggttattagaagggatttagttttttaagtttaaagtgtaggaataaattttttaattttgaaatagaagatttatatgtagttgtaagattaatttgtaagtataggggagattttatttgttttttatttaatttattttaatggtaatattttgtaaaattataatatagtttagtatatttttaaattattaaatagagatgtaatttagtaattttatttttatatatatatttgagtaaattgaaaatatatgtttataaaaatatttgtgtacgaatgtttatagtagtattattattattattattattattattattattattttgagatagagtttcgttttgttatttaggttggagtgtagtggtgcgattttagtttattgtaatttttatttttcgggtttaagtgatttttttgttttagttttttaagtagttgggattataggcgtatgttattacgtttggttaatttttgtatttttagtagagatggggttttgttatgttggttaggttggttttgaatttttgaatttaagtgatatttttattttagttttttaaagtgttgggattattatagtaatattatttttaatagttaaaagatggaaattatataaatttttatttatagatgaatgcgtaaataataagtggtttataattataatggagtattatataaatataatggttataaaaaggaatgaagtattaatatttgttataatttggatgaattttgaaattattatgtaaagtgaaaaaagtgggatattaaaggttatatattatacgattttatttatataagtattttgaatagggaaatttgtatcgataggaagtggttgtttagggttggagtgaggggaatggaaggataggggagttatttttaattaaagggtataaggtttttttttgaagtgatgaaaatgttttataattgattgtggtgatgattgtatttatttgtgtatgtttgtggaattgtatattttaaatgggtggattgtttggtatataaattttattttaataaagttgttgaaaataaaatataaattatagtataatagtataattaggataatgatatagttaagattttgagtattttattattataaaaatttttgttattgttttttatagttatttttattttttttttatttttatattttttttaatttttggtagttattaatttagtttttatttttataattttgttatgtaaaaatattatgtaaataaaataatttaatatgtaatatttgggaattaattttttttttttgaaatggagttttattttgttgtttaggttggagtatagtggtgagattttagtttattgtaatttttatttttttggtttaagtaatttttttgttttagttttttgagtatttgggattataggtgtacgttagtatgttttgttaatttttttgtatttttagtatagacggggttttattatgttggttagattggattcgattttttgattttaggtaatttatttgttttagttttttaaagtgttgggattttaggtatgagttatcgcgttcggttgggaagtaatttttatttatttagcgtaattttttggaaatttattaaggttgttgtgtgtatagttagtttttttttttttagttgagtagtatttttagaaattattttgatttttatttttttttatttattatatttaatttaggagtaagttttgttggttttattattaaagtttattttagattttattttttttcgttatttgtatgaatatatttgtttatattattattagttttcgtttagtttgagaatattaaattgattttgttgtttttatttttgtttttttataatttatttattatataatagttagaatatattttaattaaaaatttttatattaggttaggtgtagtggtttatatttgtaattttagtattttgggaggttgaagcgagcggattatgaggttaggagattaagattattttggttaatatggtgaaatttcgtttgtattaaaaatataaaaattagttgggtacgtgtttgtagttttagttatttaggagtttaaggtagaagaatcgcgtgaattcggtaggtagaggttgtagtgacgcgagatcgtattattgtattttagtttggtaacggagagagatttcgttttaaaataaataaataaataaattttatattattttttaaaggtttattttttttttttatttatatatatatttaaaaatatttattgagtgttaattatatattgggtattgtttagattttcgagaagtagttattatatttaaaataatgataaaatttttgattttgtggaattaatataatagttagggaagattaaaagtaaataaaataagtaaaatattgtaaaataaaaaaaataaagtaggaaagtaagatgagaagtttttgtaggtaggttagttatatttttaaatagattggttagggaaggttttattgagtagatgatatttgagtaaaatatgaaggagatagggaaagagttatgtagataattgggagaagaatatttcgggtagaggtaatagtaaatataataggataagatgaaagtaggatgggagtagttgaggaattgaagggaaatttgtgtggttggagttaagtgagtaagaggggaatatttaggagatgaggttagagaggtaatgggtttagatgatttattggtttgttaggttatttataatatttattatattttttattttaaatgagatagtaagttttggagatttttaagtataatttgatttttaaaattttattttggttgttttatgaagaataaagtataggaggaagaggggaagtaaggtgattagtgacgaggtgatttttaaaattaaagtaggagatagtggtggtgtgtattagagttgaaatttcggaggtggtgtgaattgattgggtttgaatatgtcgtaaagattagagttaaaaggttttttggtagattttatgtatagtgtaagagaaaaagttaatgatgattttaaggttttgagtttggggaattgtatagatggagtggttatttatcgaggtgaagagtgtagttggagtaggtttggtaagttatatggggaaatttggtttgggataagtttacgttgaaatgttgggtatatttgagtttgggattaatagttagttttgcggttataatttgggagttgttaatgtgtagattgtatgtaaaggacgttattatttagggtattggtttagatggagaagaggtttaagatttttggggttttttaaaatgaaaaggtttaaaagatgagaagtaattagtaaaggatattgtagagtatttagaaaaaaattttatattttttattataattatgatttgatttttgttaaattttttaattttattttttagtatatataggttatttaatttttgaaacgtatatattaagtttttttttgttttatggttattgtttttgttgtacgttttaataattatgtttttattttggttttagttttaattattttttttttttattatagtttttagttaatttgttattttattagatttttttttaatttttttaatttttatttgagttttttttaattattttaattaaataggtttaatttaattatttttattaaattatggtttttattatatttgaaatttgttttatttattttttgtttaaaaatttatttttattttaataatcgtttataaaatgattagcgtatgttaaatgaaaaagtttagatatttttttttgtatgtaattttttggaaagtaggggtttttttatgttgttttttgtcgtattttaatgtagttatattgttttagtaattaattttgagtttttaatagttattaacggaatagattgtaagttattgattggtaatcgaaggttagtattagaaagaggatatcgataaatttataaatagagggatttgttttcgttattcgcgttttaacgtaaagggtgggataattcgcgcgtatgcgtcgttgttttttgttttttagggtaaatttcgtttttttttttaggttagttttattatagtatatgcgtagtataggatttgtttgttcgtttgtcggcgttattaataaagttttagtgagtatagatttttttttttttggtaagatggcggagtacgatttgattattcgtatcgcgtattttttggatcggtatttagttttttcgttttttgaatttttttttgtaaaggaggtgagggggtttttgggcgtaaggaaggcgtgggggcggatgaggtgttgagtaaggtcgaaaggtggtgtttgtagttttaggtttgatacgtgcgaggcggtcgcgagtttggtttttggacggatattaaggattttttggtagtttagcgtcgttttagttaagaagtatcgtattattcggtagtgaggaggagggaggttacggagagagaaaagaagttttttttatttattgaggtgttagtgcgggagggattttcgtattattttttttcggaagttggcgattcgttggtttcgttagagaacgttagagttttataggttggtttgtaaaagtaatttggagtgttgttagagtttttgattttttttttgggaattgtgggaagtttgggtttggttgtgggtttttgtatgtcgagttttttggagtgatttttttatatttaaaataagtatttagcgttttaatttttatgaagttgtgagttttttgcgtttttttgttttggttaagtaggattttttagaatagtatatttcgttagatggggacggcgttttttcgtttttttttttagaaaaaatttttttaatttttaaatgtgttttttagtggatatattgtattgattttatgtggtttgaattggtcgttaatatttaattatttatttaagatattatgaataaatgtgtaattttggaattttattttaaagtatatgttagttttaaaagttttattggatttgaaagttttggttaaaagaaaattgatattagttatatcgtgagtttattgggaaattgatgtattttaataatgtaaagtaatttgtagtgatgaaggaattcgaatttttttagaaaaataagtgagttttgtttttggaagtagattataatataagtttatttagggaattttagatttggggagtggattttgtgtagtaaaagataaaaagtaataaaataaaaacgttttaaaaattagcgtttaggtgttgtggttcgttagataggtataatttttatatttatatgtattttttttaaatatagataattttaaagttgttgacgttaggtaacggttaagattatttttagtaaatgtttaagaatgttttgttatgtaaaatttttttttgatatatttttgttttgatttttttttttatatttgtattttagattttgagtaaaatattcgtatttgtattgtttttttttttggaaaagtgaggataaaagatttagtaaaaatgttatattttgaaagtttttattagttgtttgtagaagtatttttgaattagttgaattttatatatttttgtgttttttataattttattttttttatggtatatagaaggaaaggaggaatatgtaaatgtgaattagatttttatagggttagacgaaaattatgaattgtaggtagttgagaattagtgggaaaaattgtttaatatttatttttttggagaaaatgttggtaagatagttgtaatatattaagaggaagatagatgttggagtatttaattagtaattgttaagtatatttgatttttggatagtataggggttaggaacgttgagttttcgtagttaaaaattcgttataagttttgatttttttaaaatttaatatattttaatgttgataggaaggtttattgagaatatggatagttttgtgttgtatgtgttttatattgtattattataataaagtaagttagagaaaataaaatggttttaaattataaggaagagaaaatatatttattttttagtaagtggaagtatattattatgaaggtttttattgtttttatattgagtaggttgaggaggaggagtaaaaggaggggttggttttgttgttttaggggtagtagaggtggaagaagtagaggaagtggatgggaagttaggaaaggtaggtatatttggtgtaatttttattgaaaaaaagttgtgtatacgtggatttgtgtggtttaaatttttgtcgtttaagggttaattgtatagggttatataattgagaaatttaagataaaatttagatattttattattaaataatttatttattttttagagttgaatgtttttgatataaggtaaaaataaatgtcgaagaggtaggtattggtagagtgttattaaaattgagattttgttatttttagtgagtaaagaggattttgaggaggtgaggttttgagttttgaaggtaaaatggttagaatagagttagtgattttgttatgtgaggatatagtagttttttttttttatatttttttagtagttttaatttttgtagttttagttatttatggtttaaaaatattaaatggaaaattttagaaattagtaattcgtaagttttaaattgttcgtttttttgggtagtaggatgaaatttgtttcgtttttttgtttaaaattgggatatgaattatttttttgtttaatgtatttatattgtatatgttaatttaattgttttattttgttattgtttattttttgtttttagtttataaattaaattttattataggtatgtatgtataggaaaaaaatagtaaatataggattggggttatttgtagttttaggtagtagtcgttggggggttttggaatatttagtttatggataaggggagattattatattgtattaagagaaaaatagttttatatatttgtagtatattggagaatataagttttatgagagtagaagtttttttgtgtttttagtatataatatgagtttggtataaaggttttttatgattgtttaataaatgattgaatgaatatatatttgttttttatttttttttatttttatgtgaagtagaaggttagatagtgaaatatttaggattttgggttttgaattggattttttatgattcggttatttaatatttttgtgtagttagagtagatttttttatttttttaatttttttttatgaataaaatgttaatattattattaattttatcgggttagaaaaattatatgagataatgtatataaaatattacgtttttttgggatagagtgagtattttttaatgttttgtgttttgagatagggtttcgttttgttatttaagttggagtgtagtggtataattttagtttattatagttttgattttttgggtttaagtaatttttttattttagttttagaagtagttgggattataggtgtgcgttattatgttcggttgattttttttgtattttttgtagagatggggttttattatgttatttaggttggttttaaatttttgaatttaagtgatttgttattttggtttcgtaaagtgttgggattatagatatgagttattatttttggttttaaatgttttttattttggaagattagtttattttgtattggtatgggatgggaggggggggtagtgagggttttgaggagtaaggtaaggattggaaatggttattaagaaattgattaaaggaaagtataaggattggttaagtgtggagggtttaattgagattggaaattatattttagagttaataatggggttatttttagggcgaggagcggtagaaggttatgggagtagtatagatatatttaggggtaggtttgtatgtaaatgttatttagagaagtatagatgtgatcgaataatattattttttaattttgaaatattttgtagttatttttagttagaatttagagaataggtgattttttttttagagttagtgattgatattgaattgtatatagttggagaaattagtttgaaagaattaatgatagaattgaagagaaaatttttgaaatagttaaaaatgatatttaaattaaggtagaaagtgatattaaaaagggtattataaaaattagaaagggtagaaagtttgagatgatgaagattttaatggtaatggtggaaggggttattagttttaagttggaatttttggagatgaggggttattagttttaagttggaatttttggagatgagatatatgatgaaaattgttataatttgaggaataaaggaattttagggtttaagtttttaaagagttattagtatggtattatatttgtgttgaatgatagtagaggaagagatagtaaaaaaagatttttaatttgttaaaaagtaatatgtttttaagaggttgatagacgacggattagtagattatagtttgggaattagatagtagtttgtttttgtgtggttttggggttaagaatagtttgtaatagaggaatatttgtaaatattagtaattatagaatattaattttatattttaattaagtgaaataattttttttgaaaaagtattttatttttattaatagatttgtattataaaaatttttattgttattatttttgttttaaaatttttaaaaaattgtggaaatttgattttcgttttttatgtgagtatttatatagtatttttaattgttgttttttgatataaagtttgaagtatttgttttttgtttatgaggtagaattgagaggtatatgtagatttgagaataggatagtaatatttgatggtagaggagtaaggttattgaatttattgtggagagagacgtggtaaattaaaagttattagtggagtggggagaggtagcgtgtttggaaaagaatgtttttatttaagattagtgtttttatagggtaaagtgatgagaagttaaggttttttaggtaaattttttattagatatgacgtttatttatataagtatataaatataaatgtattggttaatgatatatattttttttaaaatgaatagcgaatatatttatgtgattattatttagattaataaataaaatattatagatatttttttttttttttttttttttttttttttttttgagatagagttttgttttgtggtttaggttggagtgtagtggcgtaatttcggtttattgtaagttttattttttgggtttacgttatttttttgttttagtttttcgagtagttgggattataggcgtttattattacgttcggttaattttttgtatttttagtagagatagggttttatcgtgttagttaggatggtttcgattttttgatttcgtgattcgtttgtttcggttttttaaagtgttgggattataggcgtgagttattgcgtttggcgatatttttaaatttttattttgatttttgttagttattatttatattttttaaaggtaagttgtagtttgatgatttattttgtttgtttttgatttttatataggtggagttaagtatttattattatgtattgttttgtatgatattttttatttagtattgtttgtgagttattatgtttttaggatagtagtagtagtttattgattttttagtgtcgaatgttaatttattatgagtatgttgtggtttgtttttttattttaatattgatagatttggttattataaatagtgtttttgtgtatatttttggaagtgtattttgattatatgtatttatttgttttggatgtttcgaaataattgttggattaaaaagtatgtttggttttgggagataaaaattttataaagtagttgtatttttgttagaagagaataggttttagttagtttatatttatattaatattggtattgttaggattttttaggtttttattgtaatttttagtatgtatttttttatgattaatgacgttgagaatttttttatgtgtttgttggttatttggttgtttttttttgcgaagtgtttattttttagttattttaattgtaaggtttgttttgttttatttatttataggagttttgtatgtaatttggaaggttcgattttgtttttatggttaaatattttttgattatttttatttttattttttgtgggtagtgaaatattgtggtatttttttggatttttttttttttgtaaaattaagtttagtatagaaatttttttttttgttgaagtatttttgttcgtgaatattttgtagaatttttatatattatttagtatattttatgttgttgtgagtttgtgtatatgtatttatttgttttttgtattataggttaaattatgtttttttggattttttgtaaagtaaaagtttgatttgatatggttgatttaaaaatttggtgtaggttgttttagtaatgtggatggagaagtatataggagtttattattgattatttggatgtggagaagtgatagttatatgtgttttataggaaagatggtgtgggttttatttatatatagttttgtttagaaagggtaagagatggtttgtagggatatataaaaaataaggttatgtaaattagaagtaggtgggaatgtttatagtaattttttttattttaaaatttttaggtaagtaaaatatttttacgtttataggttggttgtttgttatattgtttgttattattataagaggggaatgttaatggtttatcgtattttataaagtattttttgaaatatatttttaggtaaattagttttagtattaattagtttatttggggaatttaaatatatttattagaaagttatttttttttgtaga

SEQ ID NO: 2092 - DNA, 11812 bp, Artificial Sequence
  chemically treated genomic DNA (Homo sapiens)
tttgtaaaagaagataattttttaatgaatatatttaagttttttaaataaattgattaatattaaaattaatttatttggaaatatattttaagaaatattttataaaatacgataaattattaatattttttttttgtaataatggtaagtaatatggtaagtaattaatttatagacgtaaaagtattttatttatttaaaaattttaaaatgaagagaattattgtagatatttttatttatttttgatttatatgattttattttttatgtgtttttataaattattttttattttttttaggtaaggttgtgtataaataaaatttatattattttttttgtaaagtatatatagttgttatttttttatatttaggtaattagtaataaatttttatatgtttttttatttatattgttgaaataatttgtattaagtttttaagttaattatgttagattaggtttttgttttgtaaaggatttaaaaaagtataatttaatttatagtatagggagtaaatagatatatatatataaatttataataatatgaagtgtattgagtaatatgtaaagattttataaaatatttacggatagaaatgttttagtaaaagaaaagatttttgtattgaatttaattttgtaaggaaagaaaaatttaagaaaatgttataatattttattgtttataaaaaataaagatgaaggtggttaaagggtatttagttatgagagtaaaatcgaattttttaaattatatgtagaatttttataaatgagtaagataagatagattttgtaattgaaatggttaaaagataggtatttcgtaaaagaagataattaaatggttaatagatatatgaaaaggtttttaacgttattaattataaggaaatgtatattaaaaattataataaaaatttaaaaaattttgataatattagtgttggtgtggatgtagattaattggaatttatttttttttggtaggaatataattattttgtaagatttttattttttaaagttaaatatattttttgatttagtaattgtttcgaggtatttaaaataaatgggtgtatatagttaaagtgtatttttaaaaatgtatataggagtattatttgtaatagttaagtttattaatgttaaaatgagaaaataaattatagtatatttataatagattaatattcggtattgaaaaattaatgaattattattgttattttaaaaatatgatgatttataaataatgttgagtgaaagatgttatataaagtagtatatggtggtaaatgtttaattttatttatataaaaattaaaaataggtaaaatgaattattagattatagtttatttttagggggtgtgagtagtgattaataggggttaagatgaaggtttaaggatgtcgttaggcgtagtggtttacgtttgtaattttagtattttgggaggtcgaggtaggcggattacgaggttaggagatcgagattattttggttaatacggtgaaattttgtttttattaaaaatataaaaaattagtcgggcgtggtggtgggcgtttgtagttttagttattcgggaggttgaggtaggagaatgacgtgaatttaggaggtggaatttgtagtgagtcgagattgcgttattgtattttagtttgggttatagagtaagattttgttttaaaaaaaaagaaaaaaaaaaaaaaaaaaaaaaggatgtttgtaatgttttatttattaatttgagtggtggttatataaatgtattcgttatttattttgaaaaaaatatgtattattgattagtatatttatatttgtgtatttgtatgaatgaacgttatatttgataaaaaatttatttaaaaaattttaattttttattattttgttttatagaaatattaattttaaataaaaatatttttttttaagtacgttatttttttttattttattagtaatttttaatttgttacgtttttttttataatagatttaatagttttgtttttttattattaggtgttattgttttgtttttaaatttatatatgttttttaattttgttttataagtagaaagtaaatattttagattttgtattaagaagtaataattgaaaatattatataagtatttatatgaaaaacgagaattaaatttttataattttttaaaaattttgaaatagaaataataatagtaaaagtttttgtaatataggtttattaataagaatagaatgtttttttaagagaaattattttatttaattggggtataaagttaatattttataattgttaatgtttgtaaatgtttttttgttataaattatttttagttttaaaattatataaaaataggttgttatttgatttttaggttatagtttgttgattcgtcgtttattaattttttgaaaatatattattttttaatagattaagaatttttttttgttgtttttttttttgttgttatttaatataaatataatgttatattgatgattttttaaaagtttgagttttaaaatttttttattttttaaattatgataatttttattatgtattttatttttaagaattttaatttaaaattgataattttttatttttaagaattttaatttaaaattgataattttttttattattattattaaaatttttattattttagattttttgttttttttaatttttgtaatattttttttgatgttattttttgttttagtttggatattatttttagttattttaaagattttttttttagttttattattgatttttttaaattaatttttttaattatatataatttagtgttaattattaattttggaaaaaaagttatttattttttaggttttggttaaggatgattataaaatgttttaaaattagggaataatgttattcgattatatttgtgtttttttaaatggtatttatatataagtttatttttaaatatgtttatattatttttatagttttttatcgtttttcgttttgagaatgattttattattagttttaaggtatgatttttaattttagttgggttttttatatttaattaatttttgtatttttttttgattagttttttagtaattatttttagtttttattttattttttaaaatttttattgttttttttttttattttatattaatatagaatgggttagttttttaaaataaaaaatatttagagttaagggtggtggtttatgtttgtaattttagtattttgcgaggttaaggtggtagattatttgagtttaggagtttgagattagtttgggtaatatggtgaaattttatttttataaaaaatataaaaaaaattagtcggatatggtggcgtatatttgtagttttagttatttttggggttgaggtgggagaattgtttgagtttagaaagttagggttgtaatgagttaagattgtgttattgtattttagtttaggtgataaagcgagattttgttttaaaatataaaatattaaggagtatttattttgttttagaagagcgtagtgttttatatgtattattttatgtaatttttttaattcgatgagattggtggtagtattaatattttatttatgagaaaaggttaagagggtaaaagaatttgttttgattgtatagaggtattaaatgatcgagttatgaaaggtttaatttagagtttagggttttaaatattttattatttggttttttgttttatatgaaaataaagaagagtgagaaataagtatgtatttatttaattatttattaaataattataaaaagtttttatgttagatttatattatgtgttgagagtataaggaagtttttgtttttatgaagtttatattttttaatgtattataaatatatgaaattgttttttttttggtgtaatgtaatagtttttttttatttatgagttaaatgttttaagattttttagcggttgttgtttgaaattgtagatagttttaattttatatttattgttttttttttatatatgtatatttatgataaagtttaatttataaattgggaataagagatgaataataataaaatagaataattaagttagtatatatagtgtggatatattggataaaaggatgatttatgttttagttttaagtaagagagcgagatagattttattttattatttagaagggcgaataatttaaaatttacgaattgttaatttttggaattttttatttaatatttttggattatgagtaattggaattgtagaaattgaaattgttaagggggtgtggggggggggggttgttgtatttttatatagtaggattattgattttattttaattattttgtttttaagatttaaagttttatttttttaaagttttttttgtttattgaagataataaaattttaattttgatagtattttattagtatttattttttcgatatttatttttattttatattaaaaatatttaattttaaaggataggtaagttgtttagtggtgagatgtttgggttttattttggattttttagttatatggttttatataattaatttttggacgataagggtttgaattatataggtttacgtatatataatttttttttaataaaagttatattaagtgtgtttgttttttttgattttttatttattttttttattttttttatttttgttatttttgaaatagtaagattaatttttttttttattttttttttttagtttatttaatatgaagataatgaagatttttatgatgatgtatttttatttattaaaaagtaaatgtatttttttttttttataatttaagattattttattttttttagtttattttattgtaataatatagtatagaatatatataatataggattgtttatgtttttagtaagtttttttgttagtattaggatatattaagttttgggggagttaaaatttataacggatttttgattgcgagagtttagcgtttttaatttttgtattgtttaagagttaaatgtatttagtaattgttaattaaatattttagtatttgttttttttttggtgtattatagttattttattaatattttttttaaagaggtgggtattgggtagttttttttattgatttttaattgtttgtagtttatagttttcgtttagttttatgaaaatttaatttatatttatatattttttttttttttttgtgtgttataaaaaaaatgaaattataaagaatataaaaatatataaagtttagttagtttagaagtatttttataagtagttggtaaaggtttttaaaatatagtatttttattagattttttgtttttatttttttagaaaagaaaataatgtagatgcgaatgttttatttaaggtttaaaatataggtgtaaaaagaagaattaaagtaaaaatatattaagagaaagttttatatgataagatatttttggatatttattgaaaatgattttagtcgttatttaacgttaataattttagagttgtttatgtttagaaaaggtgtatatgaatatgaggattatatttgtttaacgagttataatatttggacgttggtttttgggacgtttttgttttattgttttttgttttttgttatataaaatttattttttaaatttagagttttttaagtagatttatattgtagtttgtttttagaaatagaatttatttatttttttgaaaaaattcgaatttttttattattgtaaattattttgtattattaaaatgtattaattttttaataaatttacggtataattaatgttaatttttttttagttaaaatttttaagtttaataaaatttttaggattgatatatgttttaaaatgaagttttagaattatatatttatttatgatattttgagtagataattgaatattaacgattaatttaaattatatgaagttagtataatatatttattggaaaatatatttaaagattggagggattttttttgggggggggggcgggggagcgtcgtttttatttgacgaaatatgttgttttagaaagttttatttaattaagataagaaaacgtaaagaatttataattttatggaaattaaagcgttagatatttattttaagtgtaagagaattattttaaaagattcgatatgtaaaaatttatagttaagtttaggttttttatagtttttaaaagaaaaattaaaagttttaatagtattttaggttgtttttataagttagtttgtgaagttttaacgttttttagcgaaattagcgaatcgttaattttcgagaagaaatgatgcgaaaatttttttcgtattgatattttagtaagtgaaagagatttttttttttttttcgtaattttttttttttttattgtcgaatagtgcggtgttttttaattgagacgacgttaaattattagaagatttttagtgttcgtttaggaattaaattcgcgatcgtttcgtacgtgttaggtttaggattatagatattatttttcggttttgtttagtattttattcgtttttacgttttttttgcgtttaaagatttttttattttttttatagagagaaatttaagaagcggaaagattagatgtcgatttaaaaagtgcgcgatgcgagtagttaagtcgtatttcgttattttgttaaagaaaagggagtttgtgtttattaaaattttattggtagcgtcgataaacgaatagatagattttgtattgcgtatgtgttgtggtaaaattggtttaaagaaaggggcggggtttattttggagagtagaggataacgacgtatgcgcgcgggttgttttattttttgcgttagggcgcgagtgacggaaatagatttttttatttgtaggtttgtcggtattttttttttaatgttggttttcgattattagttagtggtttgtagtttatttcgttaataattattgaaagtttagaattgattgttgaggtaatgtgattgtattgggatgcggtaaaggataatatgaggaggtttttgttttttaggaagttatatatagggaagaatatttaggtttttttatttggtatacgttaattattttgtaagcgattgttaaagtgagggtgggtttttagatagaaaataagtgaaataaattttagatatagtaagagttataatttggtggagatggttgggttggatttatttaattaggatggttagagaaaatttagataggaattaaggaaattagagaaaagtttgatagagtaataagttagttgagagttgtggtaagagaaggaggtgattaaaattagagttagggtaaaaatatgattgttggaacgtatagtaaaaataatgattatgagataggaagggatttagtgtgtgcgttttaaaaattgaatggtttgtgtgtattggggagtaaggttaaagagtttgataagggttaggttatgattatggtaaggaatatggggtttttttttaagtattttgtagtgttttttgttagttattttttattttttaggtttttttattttgaagagttttagggattttggattttttttttatttagattaatgttttaaatggtaacgttttttgtatgtagtttgtatattgataatttttaaattatagtcgtaaaattgattattagttttagatttaaatgtatttagtattttaacgtgagtttgttttaaattaagtttttttatgtagtttattaaatttgttttagttgtattttttatttcggtgaatggttattttatttgtatagttttttagatttaaaattttagagttattattgatttttttttttatattgtgtatgaaatttattaaaaaattttttaattttaatttttacggtatatttagatttaattagtttatattattttcgaagttttaattttagtgtatattattattattttttgttttgattttgggaattatttcgttattaattattttgtttttttttttttttttgtgttttattttttataaagtagttagagtgaagttttaaaagttaaattatgtttaaaggtttttaaggtttgttattttatttagagtaaaagatgtagtaggtattataagtgatttaataagttagtagattatttggatttattatttttttgattttattttttaaatgttttttttttgtttatttgattttaattatatagatttttttttagttttttagttatttttattttgtttttattttgttttgttatatttgttattatttttattcggaatgttttttttttagttatttgtatagttttttttttgttttttttatattttgtttaaatgttatttgtttaatgagattttttttgattagtttatttaaaaatgtaattaatttgtttataagaattttttattttgtttttttgttttattttttttgttttatagtattttatttattttatttatttttggttttttttgattattgtattaattttataagattagggattttgttattattttaaatataataattgtttttcgaaagtttaaataatgtttagtatatagttggtatttaataaatatttttgaatgtgtatatgagtaaaagaaggaggtaggtttttggagagtgatgtaaagtttatttatttatttattttgagacggaattttttttcgttgttaggttggagtgtagtggtgcgatttcgcgttattgtaatttttgtttgtcgggtttacgcgatttttttgttttagatttttgagtagttgggattataggtacgtgtttagttaatttttgtatttttagtatagacggggttttattatgttggttaggatagttttgattttttgattttatgattcgttcgttttaattttttaaagtgttaggattataggtgtgagttattgtatttggtttgatgtaaagatttttagttgaaatgtattttaattattgtgtggtaaatgaattgtgaaggggtaggaatgaaggtagtaggattagtttgatgtttttagattgggcgagggttaatggtggtatagataagtatatttatataagtagcgagaagagataagatttaagatggattttggtggtagaattaataagatttgtttttggattggatatgatggataaggaagagtaaaaattaaaatgatttttagaaatattatttagttaaaaaggaggggattagttatatatataataattttaatgaatttttagggaattacgttgagtgaataaaagttattttttagtcgggcgcggtggtttatgtttgaaattttagtattttgggaggttaaggtaggtggattgtttgaggttaggagatcgagtttagtttggttaatatggtgaaatttcgtttgtattaaaaatataaaaaaattaatagggtatgttggcgtgtatttgtaattttaggtatttaggaggttgaggtaggggaattgtttgagttagggaggtggaggttgtagtgagttgagattttattattgtattttagtttgggtaataaagtaagattttattttaaaaaaaaaaagttagtttttaaatgttatatattaaattattttatttatataatatttttatatgataaaattatggaaatggaaattagattagtaattgttaagggttaaggaggatgtgggggtgggagggaagtaagggtggttataaaaggtaatagtagggatttttgtggtaatggaatgtttaggattttaattatgttattattttagttgtgttattgtattgtaatttatgttttgtttttaatagttttattgagataaaatttatatattaaatagtttatttatttaaagtatatagttttatagatatatatagataagtgtagttattattatagttaattgtagaatatttttattattttaaaaagaagttttgtattttttagttaagggtaatttttttatttttttattttttttattttagttttaaataattattttttatcggtataggtttttttatttaagatgtttatatgaatggaatcgtataatatgtggtttttggtgttttattttttttattttatatgatgattttaagatttatttaagttgtagtaggtattagtattttatttttttttatggttattgtatttatataatattttattgtagttatagattatttattgtttacgtatttatttgtaaatggaaatttatatagtttttattttttggttattaaggataatgttattatagtaattttagtattttgggaggttgaggtgggggtattatttgaatttaggagtttaagattagtttggttaatatggtaaaattttatttttattaaaaatataaaaattagttaggcgtagtggtatgcgtttataattttagttatttgggaggttgaggtaggagaattatttgaattcgggaggtggaggttgtagtgagttgagatcgtattattgtattttagtttgggtgatagagcgagattttgttttaaaataataataataataataataataataatagtaatgttattataaatattcgtgtataagtatttttgtggatatgtgtttttaatttgtttaggtatatgtataggagtggaattgttgggttatatttttgtttaatagtttgaggatgtgttagattgtattatagttttgtaagatgttattattagggtgaattgggtagagagtaaataggattttttttgtgtttataagttgattttataattgtatgtgaattttttattttaaaattaagaagtttatttttgtattttgggtttaagaaattgagttttttttggtgattagtatatggggtagaatggtaaaggaatatgtatgggtatttaaataaggagttttgttttaggtaaaatgagatttttattaaatatttgagtggttatgtttagtaagtaaatggagatattattttggatgagttgatatagttatcgattgtttataatgtatgttattttgtatgtttttaatgatgtggaagtattatatgatttttattattatgttatttatagtattgttgggaaagtaaggatgaatgtttatgaagtagagaatatatgttagtataagttgttaaattgtggggtatagtttgtgtggtttttaagagttgagaaataatagttgtaatttgaagttttttgaaattttaggaagttgtaataaaatataaataggaaaagaggtagaagtgaggtagagtataggaagtaaggaagtaggtagtagtatgaaaattttttaaaaaggaatagagagtatttttgagaagtagagagaaataagatgtaattttatttgataaatattttgaatttttattatatgtaaggtattaagttaggtgttattgggaatatataattaataagtgttagttcgtggttataggagtttttagttttatagatgataattattaatttatttaatttaaattaaatgtttataatatgttaggtattattttaggtttagggaatatagaaggaaagaaaataatattttttaaagaaaatttata

SEQ ID NO: 2093 - DNA, 5489 bp, Artificial Sequence
  chemically treated genomic DNA (Homo sapiens)
tttgtcgaaattgtacgtgtgggtgtagggtttgggggtgggtggggtgtacggttttttgttggtttatattgtggagtgttttttgtgttatttgatttgaggataaaaggaattagtgttggaggtttgtttttttatttgcgggtgaattgtatttgttcggttatttcgtggttgagtagtttgggaaatggtttggcgttgaatggaaagtagtgagtattgtggtaggtagataggttgtaggtggcgcgttttaggtgcggtcggaattttttaggtttttggagggattgtcgtattcgtaggattaggtagttttttttgaatttgtaggttatttgtataggtagtgggggtggttataggattgtgaggttaggtagtttggagttttggaggtgtggttgttttgagttgtggtttttttagaaaagggtgttgttgttgttgttgcgaggatttattcgcgggtttaggatagggtttggtttttcgtagtgtttattttgtaggggtgttcgtttttttttttgttatttttttgtggtttgtgttttttttgtttttattaatttattttttttaaaggttttgtagagtcgggattaggtaggttttagagtagttatgtgagggatattattttttgttgttaattagttgtcgggttttttagttgcgtttttgaacggtttgttttttgttttgtttgcgagttgttttgtttagggtttaggggtagagtttgagtttgggttttgtgggtttatgtggtttttttgtttgtttttgaagtgttatttagtttttggaaagagttttggagtttaggtcgagtttgtttttttttcgtgttttgggtgttttatagaaggttgggatgtgttttgatttatagttttggtgttaggttttttttcggttgagatgttttggattttttatagagttttgtaggggaggagggttgtttagtttttttatttatgtatttatttattttttaatttattattattattattattatttgagatgaagtttcgttttgttgtttaggttggagtgtagtggcgtgatttcggtatattgtaatttttgttttttaggtttaagtaatttttttgttttagttttttaagtagttgtggttataggtatacgttattatttttagttaatttttgtatttttagtagagatagggttttattttgttggttaggttggtttgaaatttttgattttaggtgatttgtttgtttttgttttttaaataaagtgttgggattataggtatgagttattatattcggtttagtttttttagatttatttttttttatgggatgtttttagagtttacgtaagtgtattgttttttggattttttgtttaggcgtttattgttaatttgtagggttgttattggttgttaggaagagttttgtatagagggttttgtgttttgtagatgcgatggggcgtttttttttttttttatttatttattttttagttttttttttttatgtaaagtgatggtggtattattttttttttttattttattaatttagaaaattaattgatttagagcgtgttttttttttttttcgttttataatattatatagttttgtagcggtttttttttaagtgtttggtggaatttgttggtgaagttatttagattgggtttagcggaagggttgagttgttaggatgattttaaagggatgggatgttatagttgggtttttgggtttttgaaggtttttgttgttttagggttggatggggtagaattagattgttggggtagggaaaagaggaaaaaaatggttgttggggtggaggaatcggtatgtttagtttttgttgttttttttaggggttatagaggaggtggttgggtgtaggataggttagggtttgggcgttgttggtattgattattttttgtgtgattgatagttgtagttggaattattataatatgtagtacgtattagtagtttttaagtagcggggtataaaacgttttttagattcgttgggaagtgaggaggaggtagaagtatttgaagatgatagtttgtatttgtttggaggaggaggtagagatttagaagaagagatgttggtttagagttagtcggttgtagcgttggattgtgtcggttaagatttgttagggagatgggatttttgtgttatttgggttagtaaagaggaggggtttagagaatagttgaaatattgttattagtggtagtgatttgttttttttgtgtatatatgtagtttattaggatagcgagtcgacgggttacgttaggggtcggtacgtattggtatttggttttaggagcggggtcgtgtgaacggtgatgaatgttgaaaatgcgttttagagaggtatttatatgaattttgtatgagatttatttatatttttaatataaaggtttgataaagaatttagggattaaaaaaaagatggagttttttaacgtgaggatgaagtttatattttagattaaaaagggttatgttgtattttgttgttttgtgggggtttaagatttgtttgttttattattagggttttcgttttggggaagtaggttgatagagtagggtgtttttgttgtttagcgggggttttgttttgtgatttgtgtatatttttggggttaggggtatagagtttttttttgattttttggggatgttttggagtttggggttgggattggtttgttttggtgagtttatttagatttgtattagttttgcgtgggttatacggaggaggagatagttttttttttttgtagtgtttttgggaatagttattatgagagaggtttgggtttttattatggtagggtattttggtttttatagtttagtaatagtagtttttagggttaggatttgaggttgatattgaggtgggtattttatcgattgttagtgttgtttgttaggtttagtttgtttttcgttagcggtgtggtttttaagattttgggtagtatttggtttttttgtttatttgggaagtggagttgatatttgtttgtcggtttttcgggggtggcgtgaggttagatgtgttagagagtggagatgaatacgataggtagtgttttgtggtttatagtattgtatttgtaggtttgtagattagaggtttttgtagaagggaggagtttaggttttgatgatattaggtgttttgtggttgtataattttcgtgatttagacgagagagaatttttagttatcgtttatttaaagtataagttttagtgttttttttttttgtttcgttttttttcgtgaaataatttttagcgtttttttttttcgttttatttttttttgtgttatatgtgtatggcgatggatatttgagtagtcgtttttgggataattggagttgcggttttgtagtggggtttgggagttttcggttaggggtagttttcgtatatttggtagagatagggttttggtttttatatcgattgagtgagagtttgtattcggtattttttttttgagtggcgtttggtgtttttttgtgttattttataattttatcgtttttattagttgatgttttttggttggtcgttttttaggagttgagaagtttgaagagggttaggtacggaggagtaggaacgaggatagttaaatgtgttaagtttgtttttggttgtaattggtaatgttttatgtttgttattttagttttttattattttgtaaggattggtagtaaagttttagtgatggataacgcggtagtggggaaagtgatagtcgtggttagattattagatgtgtttgtagaattcggtgtgtttttgtgaatattcgttagtagtaattatttatattattttaaaaatttgtattattaggttgaaaatgggtaaatcggggaaaaagttagtatttatttagttatttttttgtgaattaatttatgtataataaatagatttttttaatggaagaattttagttaggattcgagtagttgggatttttatattgatcgtttatgttgtgaacgtaaaaaataaaaataaaaaaataaatttaaatagcgttcgggaatggtggtttacgtttgtaattttagtattttgggagttcgaggcgggtagattatttgagttcgggagtttaagattagttagattaatatggagaaatttcgtttttattaaaaatataaaattagtttggcgtggtggcgtatgtttgtagttttagttatttgggaggttgaggtagaagagtcgtttgaatttgggaggcggaggttgcgttgagtcgatttcgcgttattgtattttagttcgggtaataagagggaaatttcgttttaaaaaaaaaaaaaaaaaaatttaaatagaatcggcggtttatttgtttttagattaatttagattaagtttttgggtggaattgtagtttttaggatataatatttcggggttagtaaaattcggaggggtcgtttcgtgggagtcggagtcgcgaggagatagttatggaagcggaggggtagttttgatttcgcgtgggttttgacgtcgagattaagacgagtggttatttaggaggatgtggattttggacgttcgtggtgagttaaggatgagacggaggtaaggtaagaagcgtcggattgagtcgtttcgaggtagttttgttttgcggatggcggaaagggtgcgtcgtttgtggaggcgttcgatgggggcggggttggggatttcgggagttattagtattttttagtttcgagtacgagtttttagttattatcggaaggaagatagggttttcggaattttattcggaggttttgcgtaggcgcggttttcgtttatcggcgaatttattggatagggttgagacgggggcgggttttggtttcgtttagaaggttgcgtaggcgtagtttcgacgagtaacgcgtttgtagaggggtgggtgcgtacgttttgtttttgcgtgatttttcgatttcgttgtttttatcgtaatggcggttgtgagggttttggtggtttcgaggttcgttgcggtatttgtatttacgtttttgtttttcggcggtcggacgtttttttagcgcgtagttttttattttttcgtgtcgcgtttcgcggttagggtcgcgttggtgagtggacggagggggtgaggttagttttcgtttttagagattagttttcgttgttttttgtttaaggtcggtttttttttttaggttcgttttcgtcgttttacgtcggtttttttattttaagttagtttttgcggtttaggtcggttttattttttcgggttagcgttcgcggtttaggtcggtttttttttttttagttaattttcgtcgtttaggtcggtttttttttttcgggttagttttcgtttttttcgtagg

SEQ ID NO: 2094 - DNA, 5489 bp, Artificial Sequence
  chemically treated genomic DNA (Homo sapiens)
tttgcgagaggagcgggagttgattcgggggaaaggggtcgatttgggcggcgggagttgattggggggaaaggggtcgatttgggtcgcgggcgttgattcgggaaaatggggtcgatttgggtcgtaggagttgatttggggtgaaggagtcgacgtggggcggcgggagcggatttaggaagaggggtcgattttgggtagagaatagcgaaggttgatttttggaggcgggagttgattttatttttttcgtttatttattagcgcgattttggtcgcggggcgcggtacggagaggtgaagggttgcgcgttgggaaggcgttcgatcgtcgggggatagggacgtgaatgtagatgtcgtagcgagtttcgaggttattaggatttttatagtcgttattgcggtgaggatagcggggtcggaaggttacgtagggatagagcgtgcgtatttatttttttataaacgcgttgttcgtcgggattgcgtttgcgtagttttttgggcggagttaagattcgttttcgttttagttttatttagtgagttcgtcggtgggcgggggtcgcgtttgcgtagagttttcgaatagagtttcgggaattttgtttttttttcggtggtggttgagggttcgtgttcgaggttgagggatgttggtgattttcggggtttttagtttcgtttttatcggacgtttttataggcggcgtatttttttcgttattcgtagagtaaggttgtttcggggcggtttagttcggcgttttttattttattttcgttttatttttaatttattacgagcgtttagggtttatatttttttaaatggttattcgttttaatttcggcgttaggatttacgcggggttaggattattttttcgtttttatgattgttttttcgcggtttcggtttttacggagcgattttttcgggttttattgatttcgggatgttgtattttggaaattgtagttttatttaggggtttgatttgggttagtttgggggtaagtgagtcgtcgattttgtttgggtttttttttttttttttttgagacggagttttttttttgttgttcgggttggagtgtaatggcgcgaagtcggtttaacgtaattttcgttttttaggtttaagcgatttttttgttttagttttttaagtagttgggattataggtatgcgttattacgttaggttaattttgtatttttagtagagacggggtttttttatgttggtttggttggttttgaattttcgagtttaggtgatttgttcgtttcggatttttaaagtgttgggattataggcgtgagttattattttcgggcgttgtttgggtttgtttttttgtttttgttttttacgtttatagtatggacggttagtgtgaagattttagttgttcgggttttagttggaatttttttattaaaaaaatttgtttgttatgtatgggttagtttatagaggaatagttggataagtgttggtttttttttcgatttatttatttttaatttaataatgtaggtttttgaaataatgtgaatggttattgttggcggatgtttatagggatatatcggattttatagatatatttgatgatttagttacggttgttattttttttattgtcgcgttgtttattattaggattttattgttaatttttgtaagatagtggggaattagaataatagatatgggatattattagttataattaaagataagtttggtatatttgattgttttcgtttttgttttttcgtgtttggttttttttaggttttttagtttttggggagcggttagttagggagtattagttggtgggagcgatggggttgtgggatggtataaaaaaatattaagcgttatttagaaaggaaatgtcgaatgtagatttttatttagtcggtgtgggggttaggattttgtttttattaagtgtgcgggagttgtttttggtcgggagtttttagattttattgtagagtcgtagttttagttgttttaggggcgattatttaggtgtttatcgttatgtatatgtgatatagaaaagggtgaggcgaggagggggaacgttggaaattgttttacggaaaagggcgaggtaagggaggggaatattggaatttgtgttttgggtaggcgatagttaaggattttttttcgtttgggttacggagattgtgtagttatagaatatttggtgttattagggtttgagttttttttttttataaagatttttggtttgtaggtttgtaggtatagtgttgtgggttataaggtattgtttgtcgtatttatttttattttttagtatatttggttttacgttattttcgggaggtcggtaggtagatattagttttattttttagataagtaagggagttaggtattatttagggttttgggggttatatcgttggcgagggataggttgggtttggtagatagtattggtagtcggtgaagtgtttattttagtgttagttttaggttttgattttggaggttgttgttattgagttgtggggattaggatgttttattatgatggagatttaagttttttttatgatgattatttttaagggtattgtagaggggaggagttgttttttttttcgtgtggtttacgtagagttggtgtaggtttgagtgagtttattaagataggttaattttagttttagattttaaagtatttttaagaggttagggagaggttttgtgtttttgattttaaggatatgtataggttataaggtagagttttcgttagatagtaggagtattttgttttgttagtttgtttttttaggacggaggttttggtggtaaggtaggtaggttttgagtttttataagatagtaggatataatataattttttttaatttgaagtgtagattttatttttacgttagaaaattttattttttttttaatttttaagttttttattaaatttttatgttaaagatataaataagttttatataaagtttatgtgaatatttttttgagacgtatttttaatatttattatcgtttatacggtttcgtttttggggttaggtgttagtgcgtgtcggtttttggcgtgattcgtcggttcgttgttttgatgggttatatgtgtgtataggaaaagtaagttattattattagtgatagtattttagttgttttttggattttttttttttgttggtttaggtggtataagggttttatttttttggtaggttttagtcggtataatttaacgttgtaatcggttggttttaggttagtatttttttttttgagtttttgtttttttttttaagtagatgtaggttgttatttttagatgtttttgttttttttttattttttagcgggtttagggagcgttttgtgtttcgttgtttggaaattgttagtgcgtattgtatgttatagtggttttagttatagttgttaattatataggggatggttaatgttagtaacgtttaggttttggtttgttttgtatttaattattttttttgtgatttttgagaaaagtagtaggggttggatatgtcggtttttttattttagtagttatttttttttttttttttttgttttaataatttggttttgttttatttagttttggggtagtaaaggtttttaaggatttaaggatttaattgtaatattttatttttttggggttattttggtagtttagttttttcgttgggtttaatttagatggttttattagtaagttttattaaatatttaggaagagatcgttgtagagttatgtggtgttgtggagcgagaggggaggaaggtacgttttgaattagttaattttttgagttaatggaataaaggagaaaagtgatgttattattattttatataggaaaggagaattgaaagataaatggatgagaaaggaaggaagcgttttatcgtatttgtagggtataggattttttgtgtaggattttttttgatagttaatggtaattttatagattggtagtgaacgtttagataggaggtttaaggaataatgtatttacgtgaattttaaaaatattttataagagggaataaatttaaaggagttgggtcgggtatggtggtttatatttataattttagtattttgtttgagaggtagaggtaggtagattatttgaggttaggagttttagattagtttggttaataaggtgaaattttgtttttattaaaaatataaaaattagttgggggtggtggcgtgtgtttgtaattatagttatttgggaggttgaggtaggagaattgtttgaatttgggaggtagaggttgtaatgtgtcgagattacgttattgtattttagtttaagtaatagagcgagattttattttaaataataataataataataatgaattaaaaaataaataaatatataaataagggagttagataattttttttttttatagagttttgtgaaaagtttaggatattttagtcgagggaaggtttggtattaaaattgtggattagggtatattttagttttttgtagggtatttagaatacgaggggaggataggttcgatttggattttaggattttttttaaagattgagtgatattttaaggatagataggaggattatatgaatttataaggtttaaatttaggttttgtttttgaattttggatagagtaattcgtaaataggatagagaatagatcgtttagaaacgtagttgggaaattcggtaattgattggtaatagagggtgatattttttatatggttattttgaggtttgtttagtttcggttttgtaggatttttagggaaggtgaattggtagggataaaaaaggtataaattataaagaaatgataggagaagaggcgggtatttttgtagagtgagtattgcggagggttaggttttgttttaggttcgcggatgaattttcgtagtagtagtaatagtatttttttttaggggagttatagtttagggtagttatatttttaggattttaggttgtttggttttatagttttgtgattatttttattgtttgtgtaagtgatttgtaaatttaggaaaggttgtttggttttacgaatgcggtaatttttttaagagtttggaggatttcggtcgtatttggagcgcgttatttgtagtttgtttgtttgttatagtgtttattgttttttatttagcgttaggttattttttaagttgtttaattacggggtggtcgggtaggtgtagtttattcgtaggtgagaagataagtttttagtattggttttttttgtttttaaattagatgatataaggagtattttatagtgtggattagtaggggatcgtgtattttatttatttttaggttttgtatttatacgtatagtttcgatagg

SEQ ID NO: 2095 - DNA, 10329 bp, Artificial Sequence
  chemically treated genomic DNA (Homo sapiens)
gattagagtagaattgaaggaaatagagatataaaaaattttttaaaaaattaatgaatttaggagttggttttttgaaaagattaataaaattgatagattattagtaagattaataaagaagaaaagagagaagaattaaatagatgtaataaaaaatgataaaggggatattattatcgatttcgtagaaatataaattattattagagaatattataaatatttttatataaataaattagaaaatttagaagaaatggataaatttttcgatatatatatttttttaagattaaattaggaagaagttgaatttttgaatagattaataataggagttgaaattgaggtaataattaatagtttattgattaaaaaaagtttaggattagatggatttatagttaaattttattagaggtataaggaggagttggtattattttttttgaaattattttaattaatagaaaaagagggaattttttttaatttattttatgaggttagtattattttgatattaaagtttggtagagatataataaaaaaagagaattttagattaatatttttgatgaatattaatgtaaaaatttttaataaaatattggtaaattaaatttagtagtatattaaaaagtttgtttattataattaagtgggttttatttttgggatgtaaggttggtttaatatatgtaaattaataaatgtaatttagtatatatatagaattaaagataaaaattatatgattattttaatagatgtagaaaaggtttttgataaaatttaataatttttatgttaaaaatttttaataaattaggtattgatgggatgtattttaaaattataagagttatttatgataaatttatagttaatattatattgaatgggtaagaattggaagtattttttttgaaaattggtataagatagggatgtttttttttattatttttatttaatatagtgttggaagttttggttagggtaatcgggaaggaaaaggaaataaagggtatttaattaggaaaagaggaagttaaattgtttttgtttgtagatgatatgattgtatatttagaaaattttattgttttattttaaaatttttttaagttgataggtaattttagtaaagttttaggatataaaattaatgtgtaaaaattataggtatttttatatattaatagtagataaatagatagttaaattatgagtgaatttttatttataattgttttaaagagaataaaatatttaggaattttatttataagggatgtgaaggatttttttaaggagaattataaattattgtttaatgaaataaaagaggatataaataaatggaagaatattatatgtttatgggtaggaagaattaatattatgaaaatggttatattgtttaaggtaatttatagatttaatgttatttttattaagttattaatgattttttttatagaattggaaaaaattatttttaagtttatatggaattaaaaaagagttcgtatcgttaagttaattttaagttaaaagaataaagttggaggtattatgttatttgattttaaattatattataaggttatagtaattaaaatagtatggtattggtattaaaatagagatatagattaatggaatagaatagagtttttagaaataatgttatatatttataattatttgatttttgaaaaatttgataaaaataagaaatggggaaaggattttttatttaataaatggtgttgggaaaattggttagttatatgtagaaagttgaaattggattttttttttatattttatataaaaattaatttaagatggattaaagattttaatgttagatttaaaattataaaaattttagaagaaaatttaggtaatattatttaggatataggtatgggtaaggattttatgtttaaaatattaaaagtaatggtaataaaagttaaaattgataaatgggattaaatgaaattaaagagtttttgtatagtaaaagaaattattattagagtgaataggtaatttaaagaatgggagaaaaattttgtaatttatttatttgtttaagggttaatatttagaatttaaaatgaatttaaataaatttatagaaaaaaataaataattttattaataagtgggtgaaggatatgaatagatattttttaaaagaagatatttatgtagttaatagatatatgaaaaaatgtttagtattatcggttattagagaaatgtaaattaaaattataatgagatattattttatataagttagaatggcgattattaaaaatttaggaagtaataggtgttggagaggatgtggagaaataggaatattttgatattgttggtgggattgtaaattagtttaattattgtggaagttagtgtggcgattttttagggatttagatttagaaatattatttgatttagttattttattattgggtatatatttaaagtattataaattatgttgttataaagatatatgtatacgtatgtttattgcggtattttttataatagtaatgatttggaattaatttaaatgtttaataatgatagattggattaagaaaatgtggtatatatatattatggaatattaggtagttataaaaagaaaatgagtttatgttttttgtagggatatggatgaagttagaaattattatttttagtaaattatcgtaaggataaaaaattaaatatcgtatgtttttatttataggtgggaattgaataatgagaatatttggatataggaaggggaatattatatatcggggtttgttgtggggtggggggtgaggggagggatagtattaggggatatatttaatgttaaatgacgagttaatgggtatagtatattaatatggtatatgtatatatatgtaataaatttgttcgttgtgtatatgtattttaaaatttaaagtataataataaaaaaaagattattttaaaatttatataagtttttagaatagttaaaaatattttattaaaagaagaataaagttggaggaattattttatttaatataaagttttattatatagttatagtaattatgatagtgttatattggtagagggataaatatattaatggtataaagaatagatagagaaattggaagtagatttaaaataatatggttaattgatttacgaaaaaattttagaagttatttaatcgaggaaggatagggtggtattgttgttttttgttttaataaattgtgttggataaattggatatatttatggaaaaaaaaatgaagtttgatttaaatattatattttatataaatattaatttaaaatggagtatgggtataaatttaaaattttaaattgtaaaatatttagaaaaaaataggaaaaaaattattaggatttagtgttagtggaagagttttaaatgtgatttataaaataaaaataaataaattggattatattaaaattaaaaaattttattttgtgaaagatttaattaagaggataaaagataagttataggttggagataatatatttaatttacgtatttatgaaaggatttatatttagaatatataaataattttaagaatttgatagtaaaaaaaaaaaattagattaattggattatttatatattgttgatggaaatgtaaagtggtatagttattttggtaaatattattgttttttgataaagatacggtgggttttattgatgaattgtgttgttatagtaaatgtagttattatgtttatttttattttgaagatgtgttattttttgttttagatttaaattagttatagtggtagaagtttacgaaattagaggtgaaatttaataatgattattgtttattttttttatttgttttaagaggttattggaaatagtttaaagatttattgagggagatggatattattttttagaagtaaatatagtttagtttgtattttggtataattaatcgattttattatttttataatttgttagtaaaggttatgtagcgcgtgaatatgattatggtagaattattaggttttattattatttgttttttaggatatttatttagtgttgaatgtataggtttgtttttttttttaaaatatattgagtatgtttgttttttagatatagaaatatttgatgttgttttttttattaaattttgattatatgatttgatagtaatattgaagagtttaatagttagtacgtaggttggtaagtattggttttttgttagttaggttttttttttttttatttttaaaattaaatagatcgataatgtttatgatgtatttatgtttaataaatattgtttagtttatgatttggttatgtaatttttgttagaaaatatttatttttttggtttaaaaaaattaaaagtgggaaaataaagaaatagtagaatatagtgaaaaaaaataattatattatttttgtttggatttattattttgaaattaaaatgggaaataaaagtataaataatggttttatttatataaaaagtttgattttaagatatatgatattttaaggttttagaagtatgtaatgaggtgtgtttttaattttttaaattatatatttttaatttaaagttttagttaaaatataaagattaattttttattagtaagttgttagttattattaaagttttttatggattaggaaaaaattattttgtttttatgttaaatattttggagttgatatttggggaaatataatatttagttgagttttttaggggagaaaagtaagtttaagaattgatataaagagtaggaagttagttaatgtaatatatattattttgtttttttataattatagtgattttatgtattttttagaggaaggtatatagggaagaaattattttatttggataaatagtatgtttttataggaagtatttattatatttatttgttaattttttagaattaaatttagtagttgatagtattaggattaggggtgttaattttaagtatttttagaaagttgattggttttgtggtttttattttagatatgatgttagttgtgaaattagattgaaatgttgaaataacgataaaaaaaaatatagaggttaaattagtaaagtgagtaaagttaagggataaagaaaatttgttggaaaatttataaagtaggatataaagtaaggttattagatatattttattagtgtgatatttgggaggataaagtatttaaatttttttttttatataagtggtgagatgatgaaggttgtaagagggtttttgtttttttgaagattttagatgttggggaaaggatagataagaataaggatgaattaggtttttggagtttgggaaataatgattagcgataaatttgaagggaagttaagtatacgatttttagataatattaaggagaaaggtaatgtgattttgtagttattgtagttagagataataagtttttgaggaaggggttaggggaatttttttaaggatagatagtattaatgtagtatttttttttgttattaaatttttattggtttttaaaaggagtttcggtgagtgatttgttgagatgttgtatttttatggttgttgtttttaggtattattgtaatagtttggaattttgaaattaaaatagttttgtaaaattagtttagttttgtaaagtgtatgtattaaagatgttttttatttagatattattgagttataattatggtgttaggtattgtgttagggtattaggggtatggggataaattagattttttttttgatttaaagtagtatgaggttaggtgagaggttttaatataatgtgataaaatgtgtattaggtattaagggattatagagaaaggaatatattaaatggggaaataattgatagagagagaatatttttatttgggttttaaaagatgagtaggcgttttttttttttaaatgtttgatataagggtattttatgtaaagaggattattcgtgtaaagatttagatttgtaagaacgtgaggtattttaggagttttgtatggttttatatggattatgataagtgagataggtaaattaggtagagttggttattagataatgaagttattaatttaaggagattggataataaaatgtaatatggaggtatcgaagtataaatataaggagtattattgatggttgatttaggatgtttagtttggtaatacgttaatgaaatgatagtgggggagggggtcgtattaagattaggagagagtagttttgagattattgtaattatttgcgggagatataaaggttagaatttgaatagtagtagtataaaaaaagaggggagtttaaatgatattaaggaagtagaagtggtatgatttaattatttgggtatggaaggggaaatggttagagttttggggattttgtgtttgatgtgattatggattatagaataatgtttaagagaattggttttttagtttgattgttagagtttgaattttgaatgttttagtatgttattttgggtaaagtttttagtttttatgaatttattttttttatttataaaaataagatgatagtgtttatttcgtgggatttttgtgaggatgaagtgagataatggatgtaaagttattgagtatagtgtttaatatagtagaagtattatatatatattagttattattggttatattatgatatatagttagggagttggaaagataatttgaaatttaggagacgtatttgattataggtgagtatttggaatttattgttttgtaaatagtagttatagttacgtgtgtgggtatttggagagtgagtatggatattgtgatatttagtatagtgtttggtagtagtggttgtatgtttagtaaattttgttgatagggttagggtcggattagattgtggtaagtaaggtttgtagggtataaatatatttgtatgtttcgagaagtgaggattttttaaatattgtgttttatatgttttgtttggtttatttttgttttagttttagtaagtatatataaggtgaaaaaggaaaaagttgaggttggagtttgggagaattttggatatttaagggttatggagaggaataggagttaattaatttaagtgttggatggataataggagttagagtaaagcggggaattagaatagagtgattattataaaaagagttttttaaaaagggagagattaataattagaaattatttagagtagttagtaaatatataaatttaaaattattttttaggttatttttgattgtgataatagttattttattatataaatgtgattaaggaaggaaaagagttatatagaagttattaaagagttaaagagaattgagaaatttaaaatagaagaaagtagggttaatatgaaaggagtagggagaaaaagagataattagtatattgttttattgattttgttaatatttgtgagatagatatttttattatattattgttaaatttaatttatatttgataaagttaaggtttagagtttgtgtgatttgtttaaggttataggtttagaggaggtagatatttgatttaaatttatttttgtttgatttgattttaaagtttgtttttttatttaattatattgtatagttagttttttttgtgagttttatagttatagatttaattaattgtagattaaaaatatttaagaaaaaaatggatggttgtatttttattgaatatgtatagatttttttattttttattattttttaaataatatagtataataattatttatatagtatttatattgtattagttattaagagaaatttagagatgatttaaagtataaaggaggatgtgtttaggttatatgtaaatagtaagttatttttatatcggagatttgagtatttatagattttgatatttgtagggggttttgttattaattttttatggatattgaggaacgattgtaaatggatgtaggtatggatgttatttaggagtgtttagggttaagtaaatgagttgttgagtagagaggtgggtggaggttgtgaggtattaatatgtggtggtatttatttgtattttggtgattttttttttttatagttttcggttgtttgggaagagaaggatgaaggtagatggttgttttaatttaggggttaggattgtagggtgggtatagtattgtaaacgagtgaaggaaattgagaaatatggttaatgaagagttgaagagaggtttggtatggtggtttatatttataattttagtatttttagaggtttaggtaggtagattatttgaggttaggagttcgatattagtttggttaataaggtgaaatggtgaaatttcggttttattaaaaatataaaaattagttgggtatggtggcgggtgtttgtaattttagttatttgggaggttgaggtaggagaatagtttgaatttgggagatggaggttgtagtgagttgagatcgtattattgtattttagtttgggcgatagagtaagattttgttaaaaaaaaaagagttgaagagaaaaagtttaggttaaatttaaagaaaaaaagtgagtttaaaaggaatttgtagagtaagggaaaagtagggatgttaagggattagaatattttataaagtgaatagttgtaatgaaaataagggaagaaagtttagtttattttcgtttttttttttttttttttatttttttttttttttttttttggagttaattaggaagtagttttaaatattttagaaagtttattttataagtttttggtttttttgagatggtattagatatattgttagatttttgaagaaaggaataattttaggtaattttttgagtttttgttattaattttatatatatatatatatatatgtatatatatgaaaatatataaatatatgtgtgtgtatatagttatgtattttttaataatggggatatattttgagaaatgtgttattaagtaattttattattgtgcgaatataatagagtgtatttatttaaatttaaatggtatagtttattatatatttaggttgtattgatgtggtttattgtttttaggtttttgggttgtaaatttgtatagtatgtgattgtattgaatattgtaggtaatggtaatagtggtatttgtgtatttaaatatagaaaaggtatagtgaaaatatagtattataattttatgggattattgtcgtataatgtggtttattattgattaaaatgttattgtgtagtaaatgattattttatatatatatatatatgatatgatatatatgatatatatgtgtgtgtatatatgtatatatatatatgtgtatatatatgtatatatatatatatatatatatatatgtatatatatatatgtatatatatgtatatatatatatgtatatatatatgtatatatatatatatagagagagagagagaggagaggagaggaaggagggagggaaggagaaatatgatttagatagagatatttattttttagagtttaggagtgtttttttagattaggtagatgtagtttaaaaaaaatatattttgaattttagagagatgtttaaattattgtaatttttataatatttgttaattaaaggtgttgttgatttgaaattgtttttttaaattaatgtagtgatttttttttaatatttagtgatagatattggggttatatttgtagttggattataattaggtttttgttttttaggagatatttgtttaaagttatttgggtaattatattttgaaaatagtttagttagggtgatggattattttgtaaagatttttaatgagttatttttaagtgatgataaagtgtgaagttaatcgtttatttgagaatttttttttttatttaaagtaaatttaaatatgattagaaatttgattttttattattggaatttttttgattaaaagtaaaattgaattttaatttttaaatttttatgtgtatatagtattgtgggaatattatagattttggttttatgttttaaagagaaattggtttttagattatttggattaaaaataaagatttttttaagagatgtaaaatttttatgatgtttttttttttgttaaaattaaagaattatttttttatattttagt

SEQ ID NO: 2096 - DNA, 10329 bp, Artificial Sequence
  chemically treated genomic DNA (Homo sapiens)
attgaaatgtaaaagaataattttttagttttagtaaaaaagaaaatattatgaaaattttatattttttaagaaagtttttgtttttaatttaaataatttgaaagttaatttttttttagggtatggagttaaaatttgtgatgtttttatagtattgtatatatatggagatttaggaattaaaatttaattttatttttagttaagagaattttagtaataaaaggttagatttttaattatatttgaatttattttggatgaaaaagaaagtttttaaatgagcggttaattttatattttgttattatttgaaaatagtttattgaggatttttgtaaagtgatttattattttggttgggttgtttttagaatatggttgtttaaatgattttgaataaatgttttttgaagaatagaagtttaattatggtttagttgtaaatgtgattttagtgtttgttattagatgttaaagaaaaattattgtattaatttaaaaaagtaattttagattaatagtatttttggttggtaagtgttataggaattgtagtgatttaagtatttttttagaatttaggatatgttttttttaagttatatttatttagtttgaagagatatttttgaattttggaggatagatgtttttatttgaattatattttttttttttttttttttttttttttttttttttttttttttttttatgtgtgtgtgtgtatatatatatatatatatatgtgtgtatatatatatatatatatgtgtgtatatatatatgtgtgtgtatatatgtatatatatatgtatatatatatatgtatatatatatatatatatatatatattatatatattatattatatatatatatatatgagataattatttgttgtataatgatattttggttaatgatggattatattatacgatagtggttttataaggttataatattgtatttttattgtattttttttatgtttagatatataaatattattgttattattgtttatagtgtttagtatagttatatgttgtataggtttgtagtttaggagtttaggagtaataggttatattaatataatttaggtatgtagtaagttatattatttaggtttaggtaagtatattttattatgttcgtataatgatgaaattgtttaatgatatattttttagaatatatttttattgttaaggaatgtatggttgtatatatatatatgtgtttgtgtgtttttatgtatatatatatatgtgtgtgtatgtataaaattaataatagggatttaagaagttgtttggagttgtttttttttttaagggtttagtaatatatttgatattattttaagaggattaagggtttataagatgaattttttggggtatttgggattattttttgattaattttaaaaaggaagagaaaggaaagtaaaaaggaaaggaaagaaacggagatgaattaaattttttttttttatttttattgtagttgtttattttatggagtgttttagttttttgatatttttgttttttttttgttttgtaagttttttttgggtttattttttttttttgaatttagtttagattttttttttttaatttttttttttttgatagagttttgttttgtcgtttaggttggagtgtagtggtgcgattttagtttattgtaatttttattttttaggtttaagttatttttttgttttagttttttaagtagttgggattataggtattcgttattatgtttagttaatttttgtatttttagtaaagtcggggttttattattttattttgttggttaggttggtgtcgaatttttgattttaagtgatttgtttgtttgggtttttgaaagtgttgggattataggtgtgagttattatgttaggtttttttttaattttttattggttatattttttaattttttttattcgtttgtaatgttgtgtttattttgtaattttagtttttaaattggagtagttatttgtttttatttttttttttttagatagtcgaggattgtgaaggaaaaaaattattaaaatgtagatggatgttattatatattgatgttttatagtttttatttatttttttgtttagtaatttatttatttggttttggatatttttaaatagtatttatgtttgtatttatttatagtcgttttttagtatttatggaaaattggtggtaagattttttgtaaatattaagatttgtggatgtttaagttttcgatataaaaatggtttattatttgtatataatttaaatatatttttttttgtattttaaattatttttaggttttttttaatagttaatataatgtaaatgttatgtaaatagttgttatgttgtattgtttagggaataatgaaagataaaagagtttgtatatgtttagtagagatgtaattatttattttttttttgaatatttttgatttgtagttaattgaatttgtggttgtggaatttataaggagagttgattgtatagtgtggttgagtgaaaaaatagattttagaattagattagatagaaataggtttgaattaagtatttgttttttttagatttgtgattttggataagttatataagttttgaattttaattttgttaaatgtaaattaggtttaatagtagtataataagaatatttattttataggtgttggtaggattagtgagataatatgttggttatttttttttttttttattttttttatgttggttttatttttttttgttttaaattttttaattttttttagttttttaataatttttgtgtagtttttttttttttttaattatatttatataatgaaatgattattgttataattaggaatgatttaaagaataattttgagtttatgtatttattggttgttttaaataatttttaattgttgatttttttttttttaggaaattttttttataataattattttattttggtttttcgttttgttttaatttttgttatttatttagtatttgaattgattaatttttgtttttttttatggtttttaaatgtttagggtttttttaggttttagttttagttttttttttttttattttatatatatttgttagggttgggataagagtgaattaaataaggtatgtagggtataatatttaagaggtttttatttttcggggtatataagtatatttatgttttataggttttgtttattatagtttagttcggttttgattttgttaataaaatttattgagtatataattattattgttaggtattgtattaggtattataatatttatgtttattttttagatgtttatatacgtggttgtaattattgtttatagaataatgagttttaaatatttatttatagttagatacgttttttgaattttagattatttttttaattttttaattgtatattataatgtagttagtaatagttaatgtatatgtaatgtttttgttgtgttggatattgtgtttagtaattttgtatttattattttattttatttttataaaagttttacgagataggtattgttattttatttttatgaatgaggaagatagatttatagaggttaagggttttgtttaaggtaatatattaaaatatttaggatttagattttggtagttagattaaagagttagtttttttagatattattttgtggtttataattatattaaatataaagtttttaagattttagttatttttttttttatatttagatggttaagttatattatttttatttttttaatattatttgaatttttttttttttttgtattgttattgtttaggttttagtttttatgtttttcgtagataattgtaatagttttaggattgtttttttttagttttggtacggtttttttttttattattattttattagcgtgttgttagattgggtattttaaattagttattagtggtattttttatgtttatatttcgatatttttatattgtattttattgtttaatttttttaggttaatgattttattatttgatgattagttttgtttagtttatttgttttatttgttatagtttatatggaattatataaaatttttgaaatattttacgtttttgtaaatttgagtttttgtacgagtgattttttttgtataaaatgtttttatattagatatttaaagagagagaacgtttatttattttttaagatttagatgaaaatattttttttttattaattgtttttttatttaatgtgtttttttttttatgattttttagtatttagtgtatattttattatattatattgaaattttttatttggttttatgttgttttagattaaagagggagtttggtttatttttatatttttagtattttgatatagtatttggtattatagttgtaatttagtaatgtttgaatgaaggatatttttgatgtatatattttataaaattaaattggttttatagaattgttttaattttaaaattttaaattgttgtaataatatttaaaggtagtagttatgaaaatgtaatattttagtaaattatttatcgaaattttttttagaagttaatgagagtttaatagtagaagagagtgttgtattaatattgtttatttttagaaaaatttttttggttttttttttaagggtttattatttttggttataatggttgtagaattatattgtttttttttttagtattatttggggatcgtatatttaatttttttttaggtttatcgttagttattattttttaggttttaaaagtttggtttatttttatttttatttattttttttttagtatttgaagtttttaagggggtagaagtttttttataatttttattattttattatttatatagaagaaagggtttggatgttttgtttttttagatgttatattaatgagatatatttaatggttttgttttatgttttgttttgtgagttttttaataaattttttttattttttgattttatttattttgttagtttaatttttgtatttttttttatcgttattttagtattttagtttgattttatagttgatattatgtttggagtgggaattatagggttagttagttttttgggggtgtttagggttggtatttttgattttggtattgttagttattagatttgattttagaaagttgataagtaagtgtgataaatgttttttgtgagaatatgttgtttgtttaaatgggataattttttttttgtatgtttttttttgggaaatatataaagttattgtagttgtgaaaaaataaagtgatatatgttgtattagttaattttttattttttatgttaatttttaagtttgttttttttttttagggaatttaattgagtattgtgtttttttaaatattaattttaagatgtttgatatagagataaaatgatttttttttaatttatgaaaagttttggtgataattaatagtttgttaatgaaaggttaatttttatgttttaattaaaattttaaattgaagatatataatttaaaaaattagagatatattttattatatatttttgaaattttgaaatgttatatattttaaaattagattttttgtgtaaataaggttattgtttgtgtttttgttttttattttgattttaaagtggtaagtttaaataaaaataatgtggttatttttttttattatattttgttatttttttgtttttttatttttaatttttttaaattaaggagatgaatgttttttaataggaattatatgattaaattatgaattgaatagtgtttattaaatataaatgtattataagtattgtcgatttatttagttttaaaaatgaagaagaagaaaatttagttaataaagaattagtatttattaatttgcgtgttggttgttagattttttaatattgttgttaaattatgtaattaaaatttagtgaagaagatagtattagatatttttatatttaaaaggtaagtatatttaatgtattttaaaaaaggaaataaatttgtatatttagtattgagtagatattttaaaaggtagatggtgatgaggtttggtgattttgttatgattatgtttacgcgttgtataatttttgttagtagattgtgaaagtggtaaggtcgattagttgtattaaagtataagttgagttgtatttatttttgggaaataatgtttattttttttaatgggtttttggattatttttaatggttttttgggataagtgaagagaatgggtagtggttattattaaattttatttttgatttcgtgggtttttgttattgtggttgatttgagtttgaaataggaagtgatatatttttagaatggagataggtatagtggttatatttattgtggtagtatagtttattagtgggatttatcgtatttttgttagagagtaatgatgtttattaaaatggttgtattattttatatttttattagtaatgtatgagtggtttagttagtttgattttttttttttattgttagatttttaaggttgtttatatattttagatatgagtttttttatagatacgtggattaaatatattgtttttagtttgtagtttgttttttgtttttttaattaggttttttatagagtagaattttttagttttgatgtagtttagtttatttgtttttgttttatggattatatttagaatttttttattaatattagattttgatgattttttttttatttttttttaaatgttttatagtttgaagttttagatttatgtttatgttttattttgagttaatatttgtgtaaagtatgatgtttaagttaaattttatttttttttttataggtatgtttaatttatttagtataatttgttaaaataaaaaataataatattattttattttttttcgattgaatggtttttgaaattttttcgtaagttagttaattatattgttttgggtttatttttagtttttttatttattttttgtgttattgatgtatttatttttttgttaatataatattgttataattattgtagttatgtagtaagattttatattaggtagagtgatttttttaattttattttttttttggtaagatatttttaattgttttaagggtttgtataaattttagaatgattttttttttattattatattttaagttttagggtatatgtgtataacgagtaggtttgttatatatgtatatatgtgttatgttggtgtgttgtatttattaattcgttatttagtattaggtatattttttaatgttatttttttttttattttttattttataataggtttcggtgtgtgatgtttttttttttgtgtttaagtgtttttattgtttagtttttatttatgagtgagaatatgcggtgtttggttttttgtttttgcgatagtttgttgagaatgatggtttttagttttatttatgtttttataaaggatatgaatttattttttttttatggttgtttagtattttatggtgtatatgtgttatatttttttaatttagtttattattgttggatatttgggttggttttaagttattgttattgtgaaaagtgtcgtaataaatatacgtgtgtatgtgtttttatagtagtatgatttataatattttgggtatatatttaataatgggatggttgggttagatggtatttttaggtttagatttttgaggaatcgttatattgatttttataatggttgaattagtttatagttttattaatagtgttaaagtgtttttatttttttatattttttttagtatttgttgttttttgagtttttgatgatcgttattttaatttgtgtgagatggtattttattgtggttttgatttgtatttttttgatggtcggtgatgttgagtatttttttatgtgtttgttggttgtataaatgtttttttttgagaagtgtttgtttatattttttatttatttgttgatggggttgtttgtttttttttgtaaatttgtttgagtttattttagattttaggtattagtttttggatagatgagtagattgtaaaattttttttttattttttaggttgtttgtttattttgatggtagttttttttgttgtgtagaagttttttagttttatttgattttatttgttaattttggtttttgttgttattgtttttggtgttttagatatgaagtttttgtttatgtttatgttttgaatggtattgtttaggtttttttttagggtttttatggttttaggtttaatattgaagtttttaatttattttgaattaatttttgtataaggtataaggaagggatttagttttagttttttatatatggttagttagtttttttagtattatttattaaatagggaattttttttttattttttgtttttgttaggttttttaaagattagatagttgtagatatgtggtattatttttgagggttttgttttgttttattggtttgtatttttgttttggtattagtattatgttgttttggttattgtagttttgtagtatagtttgaagttaggtagtatgatgtttttagttttgtttttttggtttaggattgatttggcgatgcgggtttttttttggttttatatgaatttgaaagtagttttttttaattttgtgaagaaagttattggtagtttgatggggatggtattgaatttataaattattttgggtagtatggttatttttatgatattgattttttttatttatgagtatgtaatgtttttttatttgtttgtatttttttttattttattgagtagtggtttgtagttttttttgaagaggttttttatattttttgtaagtaggatttttaggtattttattttttttgaagtaattgtgaatgggagtttatttatgatttggttgtttgtttgtttgttattggtgtataagaatgtttgtgatttttgtatattgattttgtattttgagattttgttgaagttgtttattagtttaaggagattttggaatgagataatggggttttttagatatataattatgttatttgtaaatagggataatttgattttttttttttttaattgaatattttttatttttttttttttttcgattgttttgattagaatttttaatattatgttgaataggagtggtgagagagggtatttttgttttgtgttagtttttaaagggaatgtttttagtttttgtttatttagtatgatattggttgtgggtttgttatagatagtttttatgattttgagatatattttattaatatttaatttattgagagtttttagtatgaaggttgttgaattttgttaaaggttttttttgtatttattgaggtaattatgtggtttttgtttttggttttgtatatatgttggattatatttattgatttgtatatgttgaattagttttgtattttagggatgaagtttatttgattatggtggataagttttttgatgtgttgttggatttggtttgttagtattttattgaggatttttgtattgatgtttattagggatattggtttaaaattttttttttttgttgtgtttttgttaggttttggtattaggatgatgttggttttataaaatgagttagggaggattttttttttttttattgattggaatagttttagaaggaatggtattagtttttttttgtatttttggtagaatttggttgtgaatttatttggttttggattttttttggttagtaagttattaattattgttttaattttagtttttgttattggtttatttagagatttaatttttttttggtttagttttgggagggtgtatgtgtcgaggaatttatttattttttttaggttttttagtttatttgtatagaggtgtttatagtattttttgatggtagtttgtatttttgcgggatcggtggtgatattttttttattattttttattgtatttatttgatttttttttttttttttttttattagttttgttagtggtttattagttttgttgatttttttaaaaaattagtttttgggtttattgattttttgaaaggttttttgtgtttttattttttttagttttgttttgatt

SEQ ID NO: 2097 - DNA, 73334 bp, Artificial Sequence
  chemically treated genomic DNA (Homo sapiens)
tttttaattttaaaatatttagatttgtgttttttatatagcgtataggttttgtgttttatgttttgtagtgattgggttgagaatatgtttttgttaaatatagtatgttgatatttgaaaatatggtagaagttggaaagttatttttatttttttttttttttttttttttgatgcgggttataaaattttggaatgattttttgaattttttttgaagtaggttttaagatttttatgtaagaagtgttgtttatatttatagtatttatttttataggaaaggtatttttttatttttgaagattgacgggttatagagaaaaatttgaataaataagttttgttaaattttttttaagtttatttttatttttgtttaattgtatttttttataattgtttattttttatgaaatttggtatagaaatatataagtttaatagtttttttgggtttttttttttttaggaaggtttttatgttatgggaaatttatatgtaatgtttatgttttgtttttgttaattttttattatggaggttttagttatgaatttaggatgggtatagaaaagttattttttattttttatagtaatttcgtaataggtatttattgattaatttattaaataggtttagttaaagtgcgaatgtttagtgatataatgaagagttgttatttttaggtttttagttagggtttgttttgtagtgagggagagaaatttattgaagttagtataggtaaagggatgattgttgtaaggatatggggtaattttgtggataattaagaatagaaaaaatatatagttagttaattttaaaattaggtttaaaaataaaaaataaggaatggaagttttttttttttttatagaataaataatagttttttaacgttattttgtttttttttgttagttaattttttttgttatttatatattttttttttttaagtaattttagttggtatgagggttttagtttttgttgtatagagatgttatagttttttagtgttgtaattttaaattttttagtaatagtttgattggtttagttagggttaggttattatttttggtttaattagttgtggttagtaatggaggttttagtataaatatgtttttttaggtgtatttttttagtagagtttagggagtgagtatatcgggggtagggtagaagtggtagtttttatgtagtatttataatatatttttttttttttatgaatttttattttttgtagttattttttttttggtttttttttttttacggtggtagattaaagttttttattattatttgtttcgttttttaaagtgtttttggtataaaaaatatttttattgtttttttttttagtttaatttatatttttttagttggaatgttttaatgggaaagtaatgtggtgattagagtgtagaagtttttgggattattttattttatttttaagttattagtttgggttaggagtaagaatattataagtaagaggttattgtaaatggagttgaagttaggttttattttttattagaagagatggttttgtgtatgagtttttgtatttgtgaaagtggaatattattattgtggattatataagattattgtgagaattaaagggaataatttaggttaaggagttagtttagtgtttggaattttaatacgtattatttataattgaggtataagaggtaaatattaaagttatggataagatagtgttaagggcgtgatggtatgtgtttgtaattttagttatttatgaggttgaagtatgagaattgtttgaatcggtgaggtaaaggttgtagtgagttgagttgagattatgttattgtattttagtttgggcgattgagtgagattttgttttaaaaaaaaaaaaaaaaaaaagaaaagataatgttaaatgttggggtgttaaataaggattggaaattaggtgggtggtgtttgaattaattttggaagtaggagttttggtataatggtttttataacgtggattttaagatagttgattttatttgttgaattttgaaggaaggtttgataatgttaggaattttgtagtatttagttaattgatttgtttttttttagaatgtaaagatttaatgtaaacgatgtaataatttttatttaaataggttattttttattttgcgatattatttgtgattgggttttatattataattaaaattgtgttttagagtaatatatatttgggttcggtggtttacgtttgtaattttagtattttggtgttattgaggtggttggattgtttaagcgtagaggtcgaggttgtagtgagttgtgtttgtattattgtattttagtttgggtgagagtgagatgtagttttaaaataaataaattaaaattatatatatatatatatatatttttatatataaataaaaattggattatttataattaattttatgatttaattaaaaagagggtttgtattgaaatatttgtttttttggaaattttttgggtattttataaagtgaatattttattattgtttaaaatattattaagatagttttatgtatatgaatgttaggtaaaatgaatttttataaatataagtttggatttttatgttatatatgttttttatttaggtttaatttaggtttaaatatggtgttattttatatattgtaaagttggatgagtttagtaattttttattaattattgaattaaaaagatagaaaattgggatatggtaagatattaattattaataaatattaaaaatgattttttagcgaatatgtaaaaggatgtgggtattaaaatagataattttttttaagaaatatatattttaattgttttttttgttgataaatgtagaatttaaacgttaatttattttcgatttgttattatagaggtgatttttttatggttaaggtgttacgatgagtgttttttaggtatgtatttttttatttaggatttgtttttgatttatttatgttatattatgtatatattaaaaatatatcgatttttttgttgtaaaatagaacgaaattatgttttttgtagtaatatggatggagttggaggatattattttaagtgaataaatttagaaatagaaaattaaatattgtatgtttttataagcgggagttaaataataggtatatatgtatataagaatgggaataataagatattggggattttaaaaagggagagggtgggaagggggtgagggttgaaaaattagttattgggtataatgtttaatgtttgggggataggtatattagaagtttaatttttattattatataatatatttatgtaataagtaagtatatgtattttcgaatttaaaattaaaaaataattaaaaagtatcgatttttttaattggtatggaatagtttcgagaatggatgtaaatatcgaattttttaatgtagttgtagattttgttagttttgttttaatttttggatcggtttttttttttaattatttttaatttttaaatagattgttgttattgttatgttatatatttattgtattatttataaatgtataatttttgtaaattagtttttgaattgaaagtatttattggtaaaacgggtatttttttattataggaatagttggatatgtttaaatatttgagagttatttttattataagtatatatagttttgtggtgttttttgttgagatagagtttcgttttgttgtttaggttggagtgtagtagtgcgattttggtttattgtaattttcgttttttgggtttaagtaatttttttgttttagttttttaagtagtcgggagtatatattaatttttgtatttttagtagagacgggtttttgttatgttggttaggttggttttaaatttttgattttaggtgatttattcgttttagttttttaaagtgttgggattagaggtgtgagttatcgcgttcggtttgtagtgtgtttttgaacgtatatgtgaagttgtagtttttttttttttttttttgagacggagtttttttttgtcgttaggttggagtgtagtggcgcgatttcggtttattgtaatttttgattttttggtttaagttattttgttttagtttttagagtagttgagattataggcgttcgttatcgcgttcggttaaacgttttgtatttttagtagagacggcgttttattatgttggttagaatggtttcgattttttgatttcgtgattcgttcgttttggttttttaaagtgttgggattataggtttgagatatagcgttcgatttaagttgtagttttatgattatgatttatggttgtgaggtattgatttaagatattttaaagtttaagtcgttagattttagaagaaaaaaaaatttattaagataagttaatgttattgttataaatgggagtttggagaaaattttattaatatttgtttgggtggtttatgtatagcgttgaattgatttgaatttcgattaaatattgtatggaattaatgtacggtaggggaaattattaattgaagatgttttttttgttgttattgtttagaacgtagttagaaaattttattttagaggttttatttcgttgataaagttttaatttttttttaaaagaattaatttttattttattttttttatattttgaatagaatatggaagaagttagcgtttttttttcgcgggcgttgttgtaattttgttttcgtcggggttttcgcgcgaaatcgggaatattggagtagtatcgatttcgttcgtttagaattcgttttagtcgggtttattttcgttagagttttggtcgcgttcgtttcgttttacggattcgagattcgtcggaattttttcgcgacgtcgcgggagcgcgcggggtcgttagttaggttttagaatgtattgttgatacgtgtgcgcgcgcgcggttttattgtcgggcgatcgcgggaaaattttaaaaaaatttaaaaagttaatacgaggtaaagttaaatttttaagttatagatttcgggcggtggtttttttttcgttattgtttaaattgttgaagtagttttcgcgaggattattcggtaagcggtaggtcgtagaacgtagcgagggcggaggtttttttcgggggtttggtcgatacgttagcggcgagagcgggaggaggaggcgaggggtaagagggaaggttcgcgagagcgggtgggttaggcgcgttttgcggtgggcgagaggggttttcgtcggcgtagggttgtggttaaggttgaggcgggaggcgggaggcgggaggcggaaggtggcgggcggtgttagttcgcggggcggggttagggcggggaaagcgggggcgggagtcggcgttggggtcgcgcggaagggagttttcggagaggcgggagtcgggtgttggcgttttggttttttttgtttattgagcgtaggtagttatgttttttttaaaggagaggagtaaaggtgaatttttttgtttcggattcgtgggagtcgtgaaaagttcgtttttttgagtcggtcgttttttatagttggtttcgtttttttcgttttttatatttttgtttttaaattttattcgtcggggcgttaggaggggcgaggtttaattagaggagttcggggcgcggttgttatttttttcgtttttcgttttttattttcggagggaggcgggttcgtagaggttagtgttttttttttattttttttgtggacgttaggttatatttttaaagttcgtgagagattttttaggtgttgtttgttggtttgttttttttaattttttaggtgggtgcgtttataattacgaattttttatgattttatgtgtttagcgtatcgaatgggggaaaagatttggagttttataatatgggaaattgggtattagaattttaagggaagagattaaggagttttttagtaaagttttgtatgtgtttggatttttgttttaatttgaaatttggaaaattttcgggtatttgattttattttaatttgtgttttatttaatgtatttaaattgtgatgtgatttgatttagtatttattaaatgagtagagtatttttgggttatttaattttagttttttgtggttgttatttattgttagtgatatgtttttagatagatcgttttttttttatttttttgaaaggttgttataaatagtagaatttatattatgtgttgagattatttattatttaagtttagatggaaaatatgtttattgcgattttatatattaaatttgaattgatgttttaatgttatgtgttgtattagagttatttggaaataagtatttatatatattatttatatataagaaaggttgtatcgaaaaagaatttgtttttttagatatattagagattttttttattaatttattatttttagtaatagagtttgttttttgagaattggattaattatattttgtatattatatattcgaatttatttttgttttattcggttatatttttttttgatttttttaaaaacgtttattaaggtattagaaaagaaaagtaggttttatattggtattttttgttttgttttttaataaaaagtattaatttgattgattggttggttgtggaagatgtgttgttgtatgtatgtgtaattgtgtatgtatattttaaaataaatggtatttttaattagttttatattttagtaggtagttttaataataattatataaatttcgtgtttatgagaattagttatagggaggttagtttggttagtagaaagttggattgattatttgggttatggagagagttagaggaaatttatatgagtggtagttttaagttggtagtgttagggttttaaatcgggttggaaatgagtattaaatgatttttaaaagttttattttaggttgggatatgtgtattttttgttttgtttgtggattttgagtgattgatttaatgtgaaaaaatatatataggagaagtattttggaagttttgtaatgttttaataaaaatgtagaagtggagaaggaaaggtaatttagataataggtagagtatggtggtttatgtttgtaattttagtattttgggaagcggaggcggaaggattatttgattttaggagttcgagtttagcgtgggtaatagagagagttttgtttttataaaaagttaagaaattagtcggttatagtgatgcggggttgtggttttagttattcgggaggttgaggtggaggattatttgagtttaggaggtcgaggttatagtgaattgtgattgcgttattgtattttatattgggtagtagattgagatcgtgtttggaaaaataaaattggtaataatttagattggttattagagttggattgggggttagtaggtaatggttttatttttattttgagattggtattttttaatttaagtttaatacgggattgagggtaagagatttgtatgttttttatgttagtattatattattttgattatggtagttttatagtaagttttgaaattaagtagtgtaagttatttaatgtttttttttatttttaaaattgttttggcggtttagggttttttatatttttatataaattttagtattagtttgttatttttttttagaaaatcgtgttgtgatagattttgtaggaattgtatttaattttgtatatttatttgggggagaattgttattttattatgaatatggaatttttttttatttgttgagcgttttaattttttttagtagtatttagtaatttttagtgtataaattttgtttttttgtaaattaattttgaagttttatttttgatggtattgtgaattgaattatttttaaaattttattaaaattttttttatcgataaagtgaaagtaagttttttgttttttttttgagatagagtttcgttttgtttgtttagattggagtgtagtggtacgatttcggtttattgtaattttcgtttttcgggtttaagcgatttttttgttttagtttttcgagtagttgggattataggtattttttattacgttcggttaatttttgtatttttagtagagacggggttttattatattggttaggttggttttaaatttttgatttcgtgattcgtttgtttcggttttttaaagtgttgggattataggcgtgagttattgcgttcggtcgaaagtaagtttattaagaaagtaaaggaataaagaatggttattttataggtagagtagtcgaattatttttaaaattttattatggattgttgttagtatataaatatatatttgattttatttattaattttatattttgtaattttttttgttgaatttgatgattatttttagttttttgtgaattatataggattttttatatacggtattatgttaatatagttttatttttttttttatgtggatgtttttagttttttttttgtttgattaattttttttttatttggttcgattttttagtattttgttgaatagatatggagtgtatattattgatttattttttattttagggggaaaatatttaattttttattattagatacgacgttagttgtaagttttttataaatgtattttattaggttgagagattttttttttgttattagattgttgagaatttttatgaataaatgttagaaatgttgtttttttgtatttattgagatgattgtggttttgtttttttattaatatgatttattaattgatttgtgtatttatattaattttgtattttaaattttatttagttatgttatataattttttttatatattgttggatttggtttagtaatattttgtttaggatttttgtattatgtttatggtaatattagtaatattttgttttgtgatgtttgtttggttttggtattatcgtaatagtggtattttagaatgagttgggaagtgtttttttttatttttttagagtttgtgaaggattggtatttttttttttttaaatatttgatagaatttatttataaagttattagttcgtggatatttttttatagggaaatttgaaattataaatttaggttttttagcgtacgtatgcgtgtgattttttcggtgaaggttgtcgtgcgcgtatttggtcgtgatttttttagagcgaggttgtgtatatatgcgcgcgttttttttatcgttagtttttatatattttttttagtattggtttttaggtatatacgtgacgtttttttagggcggagtttttatagtgtgtgcggttttttagcgtttatttttggtgggtgtgttttgttagcgttagttttttggggtgtgtcgtttttttaacgttggttttcgtgtttgggtgtcgttttagtatttgtttttaggcgtgtgtacgtttttagcgttaggtttttggtatatgtgtttttgtagcgtcggtttttgtggtgtgtattttttttagtgtaggtttttgtagtgcgttgtgattagttgtatttaatggttaattgtgtattttagtattttttttaggcgattttgtaattgagtttgtggtgggatatttttttgtgaatattttttttggcgttttagaggatgggtttttggtaagttattaaaggtggttttttagtaagttgtattggtatagtatttatagagatatttttcgtatttagtgagttatggttgtgttttttttaaaaagtttttgattttatttttgggaagaagtgggtatttttttttagggtatttattttagttttaggggtagtggtttttttttatattttttatttttgtgttttgtagaattttttgtattttttattagttagtattttgttattttagttttgttatagtgaatagtttttgattgggtatggtgatttatgtttgtaattttagtattttgcgaggtcgtagggtttgggagaattatttgagattaggagtttgagataagtttgggtaatatagtaaaatttttgttttatagaaaatacgaaattatttgggagtggtgtgtgttttatttattacggaggttgatgtgggaggatcgttgagtttaggaggttgaggttgtttggagttatgattatattattgtattttagtttgggtaatagagtgagattttttttttaaaaaagaaaatgataataataatagtaattatttatagttgattttttttatttaaattattatgtggtttttttttattgattggatttagattgatttattatttttgttttgaatttttttaagaaattatgagtggtgagagtatttagtttgtttatttttttgaattgtgaaagttaattttaaggttttttttatttttatatgacgaaagatacgtttgtgtgagagtatgtaggtttttatgaagtgatgaaattgtttttttatgtttttgtaaattagaaatagtatagattattatggaaagtggggttagagattaggaggggaggagaagaggataggattagaattgtggtcgattttatggtatttagtgggtagggtttttagatgatttgattttagatgtgattgtattttttattattttttatttttgttttttattttttagatttttgggatttgtgtttttatttttttttagagttttaatgatgtttttgtaatttagaaatatttatgtgtgatataaatattttatatatatttagttattttagtggaatttgagatttgttattttggtgattatttataagatagtttgaggttgcggttttttatatatatatatatatatatatatatatatatatagatttagaggagattatttaaataatatgaatttggttgggtgtagtgttgtgtatttgtagttttaattatttgagaggttgaggttggaagattgtgagtttaagttttttgggtaaaattgtgagattttatttttagggaaaaaaataaataaataaaaggttatgattttatgtttgtgattttttttttatttggtttagtttaaaggtatggaattgttagatatttttgttttttttataagattttggaggtgttatttattttagtgatttttaatatttttttatggttggtttttttttgttgttattttgtttttgttggttgttattgtttatttaaagttataatattataaggtattgtatttagtttaattttatttttgtaattatgtttgtatatttaagtgttgtatttaatagatttttttattaatttttgattttttttttttttttttttttgagacggaattttattttgtttttcgggttggagtgtagtggcgcgatttcggtttattgtaagttttgtttttcgggtttatattattttttttttgagtagttgggattataggagtttattattacgtttagttaattttttgtatttttgttagaggcggagttttatcgtgttagttaggatggttttgattttttgatttcgtgattcgtttgttttggttttttaaagtgttgggattataggcgtgagttatcgtttttggttaacgtttgatttattgatgattatttgtggttatgtataatgattttttttttgtttttgtgtattgtagtttatattattgttttatgtgtatatgtttgtttttataatttttagttaatttttttagggtatatttttttttattatataattgtattgatgtttgttgagtgttaatattttttttttttttttttgttataatagattttagatttttttttagtagttattattttatgggttttggggaatattgatattatttttagtttttgggggtggatttttattggtttaaggagtgtgttttattgattcgttatagttattggttaaggatgggtataagtttaagtaagtttagtttgaatatatttgaggtttgttttttatttgggatgttggaatagaagtatgtattttatttttgggtggtatggatgtgatgtgatttttgtaatggttaaagttgttttgttattatgagggaagtaggatggagagatagattaattgtgaagtttgttttgtttttggatttgttagttttttgaattaacgaatttttttttttttttttttttttttttttttgaaatagggttttgttttgttaattaggagtgtagtggtacgaatatagtttattgtagttttaaatttttgggttttaggaattatgttattttagttatttgagtaattaggattataggtatgtattataatgtttggttaattaattattattatttttgtagagatagagttatgttatgttatttaggttggttttgaatttttagttttaagttgtttttttgtttgggttttttaaagtgttgtgatgagaggtgtgagttattatgtttggttttttattattgttttagttggttttgtttggtgtagtaggggtatttaatgtttattaaatatttagatttttttttatattttttagtttatttgtagttaggtaggatattgtgattgttttagttaatagattttaagtaggttatttttaggtagaagtatttagtagtagatttttgatttagttattttttttttttgtaatggtgattttggaggttaggtgttgagatgtttgagtatttgttatgttggatttatgagtgattgtggagtagaataatatttttattttataaatatgtgtgttttatataatatgttggatatatagtattagaaaaaagttattatattataatttagtttattttgatgaatagagttgggtttttaattattggaaattaaaggtattttaggtgatatagtataattttgtaatttttagtgtgtatttggtgatttataatgtatgtagattatatattgtaattgattagtaagatatttgtttgaaggaattagttatatttagttttagttttttgaatttggtgtatttaaatatgattttgtttaatatggattgtaacgattatttagtttatttatttttatatattaaagattataataaaatattatataaaatatatatttatataaataatatcgaattgttgtttttgtttgaagtcgttagttaggaatttttaattataggtcgtaagagtgagtaatcgtttattattggtataatagtatgtattttatttatgaagtagtattttttgtagtatttggtatttagaagagtattttgtgtttttgatattgattagtattattagaatttttagttattatattaaaaaagttggtaaagttagtgaaatttttgtttgatgataagtattttgataagtggtgattttttgaaattatgtagttagttttaggagtaatagaaatatttttatatgaaatggtataatatgattgatttttttttaaaattgagtagttgtaagtaagaaaagtgtaatataaatattttttttttttttcgagatgtattttattcggttttttaggttggagtgtagtagtgtaattataattcgttgtagttttgtttttttggatttaagtgatttttttatttgagttttttgagtagttgggattataggtatgaggtagatattgtgtttgtttttaaaaatattttgaattttggtagtgatatttttttgaaggtattaaaagttagaaatttgttttattttattaaagttttaggtatttttatttagttttatacgtgtgtgttgtatttatttaatgtttgtttaaaattgtattgtttttttggttttaaaataatttaagtttaggtcgggcgtggtggtttatgtttgtaatcgtagtattttgggaggtcgaggcgggtggattatttgagttttggtggttaaggatgtaggtcggttgggtaaggtagtttttgtttgtaattttagtattttgggaggttaaggcgggtggattatttgaggttaggagttcgattttagtttggttaatagggtgaaatttgtttttaataaaaatataaaaaaaattagtcgggtgtggtgatatgtgtttgtaattttagttatttgggaggtggaagtataagaatcgtttgaattcgggaggttgtagtgagttgagattgggttattgtataaataaataaataaaaagcggtgatttgtgattgtattattgtattttagtttgggtgatagagtaagattttattttaaaaaaaaaagaaaaaaaaattaagtttaagatgtttaatttaaaaataagtttttaaaaaagtatgtttttgaggtaaaatggtgagaataggataagtatttgaaaatattgtggtatttgattagaattatttttggttatattgttttgtggttaaagtggttatgattaaatgattatatgttattttaaaaatattgtttttaaggtattattgatgtatatgaatggattgatattattatggagtggtttgttataaaagcgagtttggtttttttgtgttttgtcgttgtgtgatgttttttattgcgatgtgattttttaattttagattttttagtttttagaattgggagttgataaatttttgttatttgtaaattattgagttttatatattttggtatagtagtataaaatagattaagataggtagttgggtaatagtaagtttgagtttttttttagtagtaattggtaggagtgaaattttggttgttttttttgtagttaaatgttttattattgagttatatttattggttattttttttggatagttgttgttttttattataagtttgtttaattgttttatttatttaatttatttgttgtggattttgaatttatgatttttgtttaaagtaatttaagttttgaataattttgaaatgtatttagttgttaaattaatatttagaaaaaaatggatagattagaataaatttgttatatttattggagaaattattgtattaattagggttttttggtgatttttaagttttatatttgtagaaaaggttattattatttttgagtagtaagatattgtatattttttataaattagagttttttgttttgttgattttatataaatacgttggttttataagtatggtttttttttgttaattattttttttgattttttaatttatttttaatattattttgggtaatagttttattaaaagtgttttgtattttttaaattatttttatatagattatatgggatttttataataattatatgtgttaaggtaagataggtattttaaaaaaagaaaaatagggttgagtatttgtaattttagtattttgggaggtagaggtgggtagattatttgagttcgtaagtttaggacgagtttgggtaatatggcgaaattttgtttttataaaaaatataaaaattatttaggcgtggtgatatgtaattgtagatttatatagtgtgatatgtaattgtaggttgaagtgggaggatcgtttgagtttgggaggttgagggtgtagtgagttatgattatattattgtattttagtttgggtgatagagcgaaattttgtgtttaaaaattaaataaataaataaaaattagaaaagaaaaatagaatggagattttttaaaaaaattattttggtttataattaaggaatttttaagagattgtttaaaggaggatagttattgatgaattttttgggttgattgtgtgtgtatagtttttaaatgtgttttaattgttatgagatgataatttttttaataattaaaagagtcgggtatttttggttatttaaatttaattgattttagtagaaaatatttgttttaaataataatttttttttgaaatgtttagagagaaggaaattgagtttaatggtagggttgttggttgttatttagggaaattaatttttgtttggtgttttttttgttgtattagtagttcgatgtttaaggggggttgaagttttttatggaagtattgttaagtaagtttttcgtaggttttcggttgtatttttttattgtgtaaataggggtattaggagaaatgtaatttttgaatattgtttaattagtttttgtttggtaatgtgttttgaaatttttaatgaatgttagtaaataaattagatttatagtgtatttgatacgtatgttttttttttaaataaaatttaaattttataaatataaattgagttattttttaaatgtttgtatatgaatggaagtttttgttttgtttttttgtaattaatattataaaatttttgaaggtttttgatgtatttattgtataatgttaatttaaaataaaattttattttgattaaatttgtaggtatagagagatattaaatttatttttgttgattagtataatatgtttgtattaattagatttaaaaaatgtgtaaaggagtgttatgttgtaaagattttattatagttgtaaatattagtgtagttgttataaatttagtaaaattttaggttaaataattttaaatttattgaagatgatattttagatttagtttttataatataaatattttaggaaatgtttttgagatgagtgggattgttattaatattaatgttattaaatttaaggttgagaagttatttttttttaagttttatttttatttttaattttggaataaaatatatttttaatttgaagtatggcgtgtttttttatagtttgaaaatatttgattttgttgtttttgaattgtaggaatgtaaaaatatagtataagttttttatttttgatggttatttaatttaaatgagtttgttagaattaaagttgggaagaattaattgttaatggaatttagttgtattgtttaattaaaaaataaaaggatgttaaaaatagttgttgtttaaggattgtattagtgtgatattttagaatgttgtatttagggaaggaattttattttaaagtgatttgaagtatatttttttgtggttttgttttttatttagataaggtaggataagtatttaaaatttgtattagttttaatttgtttttttttttttagtttttatttagtgggatatttggtgaggtattattttggttatatagttatttttaaagtttttttttgtgttttgatttttaattaagttttttatgatgtttgttaaatttaagagtatgtaggggtttattggaagtgttgaataattgggttttggtttaattttttgtgtatggttgtatgtgtggggtgattttgttttttttgtttgtttattggtaattgtattaaattttatttgtttttattgaatttttttttgttggatttttggggaaatttttaaattggataatagagtaattaagtgattgtttgtaagcgatttttagtgttttattagagaggtagtatttattaaaagaaaatagttgaattttttttgtttaaatttgtttttgaaattttgttaattttttaataaggagaattgaagttaagtattgttaagtattatattgtaatttgaagttggtaattgtggaagtatatagttgatatggtgatattttttttagaggaattttggttatttttattagtataaaggatataatagattgtatttattgtttttatttttgttttattttttttgtttttttttttttttttttttttttttttttttgagatagagttttgttttgttgtttaggttgtagtatagtggtacgattttggtttattgtaattttcgttttttaggtttaagggatttttgtgttttagtttttaaagtagttgggattataggcgttcgttattacgtttatttattttttttttttcgtttttagtagagatagggtttttttatgttgtttaagttggttttgaatttttgggtttaaatgatttttttttttagttttttaaagtgttgggattataggtgtgagttaatatttttggtttttttttttttaaaaaaaattaaagaggttgtggaggtttttttgaatttttttggtgtttttaaaaatgttatattttgagaagaaaatttgggtaggtataaagaattttttttttttttgtttgaaaatttttttgtagtcgttttggaatttttttttattgttatttatttttttttttttttttgatattgggttttttgtttattttattttttttttttgttttttttttttttttgatgtgaagtagatgttttagtatttttttaaagtagaatgtgtgggagatgaattatttttagttattgtttgttgaatgtgaagttattttagttatatttgattgatagtttgtttagataagaattttaggttggaaattatttttttttagaattgtgaggtattgtttaatttttttttatttttttgtgtttttataattttatgatgatgtgtttggtgtggatttttttttatttatttttttgggtatttggttagtttttttaatttggaaatttttgttttttcgttttgagaatatttttggtgattatttttttttttttatattggaatttattataagaaagttaattaaggaagagtagagggttgtgttatgggttgaattgtgtttattttttttttatttataagttgaagttgaagttgtaatttttaatgggattgtatttggagatggagtttttaggaagttatatcggtggggttttaatttggtaggattggtggttttagaagaagaggtagagagagagatttttttttatatgagtataaagaagaggttatgtgaggatataggtggttgtttatatataagttaggaagagggtttttaataggatttaataggttttgattgtggattttatagtttttagaattgtgagaaaatatatttttgttatttaagttattatgtatgtgatattttgttatggtagtttaaattgacgaagataggttgaggttaagttaggattttagttttataaaggtgaattgtatgcgttgtaagagaatattaatatgatgttggtgcgcgtgtgtttttttttttgattggtttttttttgaatttagtttatttatttgtatattattttttgtgagttagtataagttattaatttaaggttttagatttgtgttgattaatgttatagttaataggtacgtttaattatataaatttatattaattaaaattaaataaaatttaaaatttatttttttagatttattagttatattgtatgcgtttagaagttatatgtagttggcgtttgtagtattggatggatagatagagttagaatttttttatttttgtagaaagtttggttgtataatcgtattttagatatttgttttatatttttttttttttttttttttttttgtttagtgggtttgaatttttttaggtttaagatatatttaggaatattagaatttgtagtggatatttttaaggttttaaaataatattaagaagtaaatagttattatagtgtaaattttgttaaagtgttatatgtatattgagtttataattgcgtttgtagtgattatgttatttatttggttatgtttttgtagtatggtttttagaagagttgttttttatttttattgggttttttgatatgtttgtaggatagagaattgtaggaagtaggtttttatatttgagtcgtgttgttttggtttgttgtgttgaatgttgttgtgttttttcggaagaggtaggtataagtgttttagaaggaattgttagaattttattgttttattgagtattggtgagtttgaggatttataggttaaaggtaggttattgaaagcggtttatattttggaatttttcggaatagattattttttgagatgataaaaagtataattttggttagaaggattattgaattttttggaatttattttattaggttgtgtttttataggtgggaattgtttttaagaatttttaaaatagttttttgaggtaggttttgttttatttttaaagagaagcgaggttggtatttagaaattttatattatttgttttggtttattgaatgaattagtgaatagtgacgtcgggtttagattttttcgtttttttttaaaatttgtgtttttttttattagaatgtaattagggttggttagtgattttttttgtttattacgtgggagtagtttttttaaagttgggttttgtattaaagggattgtttataaatttattaaattaaatatgtttaatttagggtaaaaattgaatgatttagaagatttttttttttttgtttttttttttgttttttttttttttttgagatggagttttattttgttttttaggttggagtgtagtggcgttatttttgtttattgtaaatttcgtttttcgggtttttgttatttttttgttttagtttttcgagtagttgggagtataggcgttcgttatcgcgtttggttaatttttttttttttttttttagtggagatggggttttatcgtgttagttaggatggtttggattttttgatttcgtgatttatttgtttcggttttttaaaatgttgggattataggcgtgagttatcgcgttaggtttttttttttttattttaaagaattgttgttatttttattttaattaaattgaaaaatatagggaaaaaatgtaataataataaattttaggtagggtatggtaatttacgtttgtaattttagtattttggattatttgagtttaggagtttgagattagtttgggtaatatagtgagattttagttttagaaaaaaagaattagttgggtatggtggtgtatgtttgtggttttagttattagggaggttgaggtgggaggatcgtttggaggaggttgaggttgtagtgagtttaaattagttatgttattgtattttagtttgggcgatagaataagattttgtttaaaaaaaatttagaattaaaaaaaataaaaaattttaataaattttttatagtattagtatttatttttgaagattttttgtatttatatatataaatattttgtataaaaatgttatgatattataaatatttttttgtagtttttttatttgatttaagaatttatgatgaatatttttttgagttagttaggaatattttttatgtattgttaatttttttgttattttaataattttgtgtgtgtgtgtgtgtgtgtgtgtgtgtgttttgatggttattgttatattgattttagttattttttattattttagtttttaggtttttttttttttttgtgtggttttaatcgagaaataattgtaagcgaggaataaagttttaaatttggtggtatttattattaaataattgtagatgtttgttttttttttatatagaaagagtttatttttatgttgtatttgttttttttatttttttttgttttattttttttttatttcgtttaattttaattttaatattagatttattttgtgtagtttttggtttgttgcggagttatttttgttattggttttttttttagtttttagtcgttgatgtgttttttggtagttagtgtaaatgatggtggtttttttattttgacgtgggagtattttaagttagtagtaatatttggtgtaataagtattagggtgggataattatatatttttggattgggattttaaaattgttagttgttttgttatttgtggtttagggattaatttgagtaagagaaatttcgtttttattaaaaatataaaaaaaaattagttaggcgtggtggtagttgtttgtaattttagttatttaggaggttgaggtaagagaattgtttgaatttaggagtcggaggttgtattgagtcgagatcgtgttattgtattttagtttgggcgatagagcgagattgtttgaaaaaaaaaaaaaagaaattgtatttattttttatagattttttttttttggttattatttgatattgttttattaggtattttattatgtattttatttttttttattatttttggtttaaattttttttttagttttttatttggattatttttttttatttttttttttatattttggattttttagattttttttttttttttaattttattattattagattttttttttgtttaaattttatgatttagttttttagtggatggagatagaaggttgaggtgaggaaggtgggggtaaatacgatatttgttgaattttaaatataaaataagatattaaggaatttatttttttttttattttttatatttgggagattatagaattggttggtcgttaatattaagtggtttttgtgtgtagatttttataaagaaatgattgataaagtttttatttttgggagttttgatagtaaaaagtgtgatatttatgatatatatattgttagttaatgatggatagaaatggatagattttgaggagatgagttttgagtatatagagatattattttgtgtgtgtgtgtgtgcgtatgtatttgagatagggttttattttgtttttttgtttggagtgtagtgatgcggatatggtttattatggtttcgattttttaggtttaaataatttttttattttagtttttcgtgtagttggaattataggtatgcgttattatgtttggttaattttttgatgttttgtagagttgaggttttattatattgtttaggttggtttcgaatttttggatttaagcgattttttttttttagttttttaaagtgttggaattataggtgtgagttattgtagggtcgtagagatatagtatatttgtgatattattagtaatttttatttgatagagggttaagtattgattaagggataaaatttattttggggtttagaaaataaggttttgttttaagaaggcggttagatgtggataacggttttagtattgaatttggaatttttttattaaaatgtagtttatatgtgggtatttagtaatagagttattgttagtaaagaattatatatgtgatatatagaggaattatatatagttttttaaaataatatgttttttatttttgaggaaattttagataaagttggaaaaattttaagtttttttattgtttattataaattatagggattttgatattgtgtagttaaaagtttagtagatttttaaaattagttattaattgatttcggttttgtatatttttgttgttttgtaagagtatttttaaggtttaaataaagttaaaagtaaggtaaatggtgtgttagattaaaattgtattttttgtttgttaatatttaaatagaaaaataaattagtttaagaatatgattgtaatttaggattttaaaattatatatatcgtagtatttttaaagtttgtaattaaaaagtagaattattgtgttttatagtattttgaaattttgtttgatgttattgtatgtttgtgttgttttgatatggtttttggattgcgtttgtggtataagattgattttttgtatttgtatattatttggttgtatagatggtattcgttttaaatttattaaataaaattagaataatgattttgttagttggttttgattgtttttatttattttggatggttgtagtttttgtgaagatggtagattaaatttggaagtgatagttaagaatagaatgggtgggttataggtttgttaattgattttagtagaatttatgttatttttttttgggtataagacgttttttttaattgaatgtttataggttagttgagttattttttgtttttatatttttattgtttttggtttagatttttttttattttttttgggttattttatttatttttatagttttagttattgtttttttgttgatgtttttatatttatgtttttagtttaggtttgttttttaattttttttttatatatttattgtttattggatttttttatttagatgttttaggttttttgtatttattatgttttaagttgagtttatttttttatttaagtatgtttttatttttttgttgttttttttagtgtatggtggtataatatatttagttttttaattagaaatttaagtaatatttttattttttttttattttttttttttattatgtttgatttaaatattaaatattatgtgttttttttgataagtattttttatttgggtgtttttttttatttttttatgtgattagattaggttttagttattgtaagatggttttttattttatagtatgattttgttttttttggtggtttattttttatattgtttgtgtgatttttttgaaatagaaatttgagtatattattttaatgttaaaaattttttagtgatttatttttgtttttagaataaagtttagagtttttattttgttttgtaaagtttttttaaatttatttattatttgtttgagtagggtgatagttttggtaaaatgtatttttatagttagaagttttttttatatttaatatattatgatgttttttttttttgtgagaagcgagaaattttattgtgatattttgtttattagtaaattatatttagatttgtgtgttttttttttaaaaaatatattatatatatttttataaagagagaaaatatgtaatagttgttaggtttttttgagaaatttttttgtagaagttatgtttggtgttgttttaatgtttttattataaagtagagagtttgtttgatgaattttatataaataaagtaatggaggtaattagataatattatagttttttttttttttttagaagaggtaataagagttagtatttatttggaagtagttgtttagatatgttaatagaagttgtgggtatttgtatttttttttaagaaagcgggttttttgaaaattttgggaaaggaaggaagagagggacggagagagggagggaagatgttatgtaggtgggttagttattagtagagggataaaaaatggtgagattaaaatataaaagtacgagtagtgtatttttttggttggtttttatttttagatgttttaaaatgtttatttttattattataagttagtgtagatgtttagagaaaggaggtatttttgatttgggtaggattttaaataattgttttttgtattgttagtttatattttgttgaaagttttttttgttttagtttgttgtttttttggtgagtttttatatatggtttagtttttagtgttaggtttttttttttggaaattttttttaatattttaaatttgggttaagtgttttatttagtttgttgtattatgtaatattttttattttgtagttttagtttgtattttaagtttagtgattatgattaatgttattgtttgaaatgaaagagattttaagagtttttttaagaggattgattagagttttgagatatttttttatttttaaatatataaaagttatgagttgtttttgaattttattataattttgaaaatttttagatatattaaaggtattttgtagatgagagttagttcgttttaatttagttgtgattattttgagtgtgaatgttagtgtttatgtttgatgttttttattttggtgtatattttaggtgtaaagttagtttaatattgttttaatatatgattgtgtttgtttggttaattgaatatattttatttgttttttttttattttttgtttttatatcgaaatttatatatttgaaatattttaatttattagatatatgtaatttttttatttatgttttattgaaattttgttggaaaatttaaattaattatttttagattaaaaaaaaaagtttaataaagttttgtggatttggtatgggaatatattaataaattttttaaaataaaaattatataattatttttaaagataatatttatttttagatttgttgagtttttttatttatttttttaaagttttttttgttatttaaagatatgatatttgaggatttgtttttttattatttttttattttttaggtaatgaaattttttgttatatttaattagtgtgtttaggttatgatttttagttattttaaattggagtgtgatagagaggttttaatatattgtgtagtagatttttgatatttttagatgtaaaaggtttgttttgatttttaaaattattttattgagatatgattgatatataaaaagttgtatatatttaatttatagaatttaatgagtttgtggataagtatatatttatgaagttattattattattaaaattgtaaatatatttattattttttaaagttttttttgtttgttttgttattatttttttgtgtatggtaagaatatttaatataagttttatttttttagtatatttttattatatagtataatattgttagttatgggtattatgtaatatagtagatttttaaaatttattttttttttaggattgaaattttgtatttttaattattattttttaatttttttttttgttagtttttggtaatagttattgtattttttttttttttttttttaattgatatagggttttattgtgttgtttaggttggaatgagtggcgtgattatagtttattgtagttttaattttcggggtttaagagatttttttgttgtagttttttaagtagttaggattataggtatgcgttattttgtttggttaattttttattttgtatagatggggttttgttttgttgtttaggttggttttaaattttggttttagatgatttttttttattgtggttttgatgtgtatttttttgatgattattgatgttgagtattgttttaaataattgttagttatttgtttgttttttttgaagaaaagttggtttaggtttttttgattatttaaaagattaggtttttttgttttgttttgttttgttttgttttgttttgttttgttttgttttttgttttgttttggtattgagttgtttgagttttttatataatatattttggatattaatatttttttagatgtatagtttgtaaatatttttttttattttgtaggttgtttttttacgttgttattttttttgttgtgaagatatttttagtttgatggatttttagtttgatgtaattttatttgtttgtttttgtttttattgtttttgtggttttatttaaaaaatttttgtttagaagattagtattatgaagtattttttttatgtttttttttagtagttttataattttaggtattatatttagtttattttgtgttgatttttttttttttttagattaatattttaaattttataatatatttatatttatatataaatttttgtttataagtataaaaggtaaagaattgtaaagaagttaagtaattgtattattagttatatttaatcgaattaatattgttgtttttcgttcgtagttttaatttagaggaaatggtagatgtcgttttatatatggattttattgttagttttagaagttggagattgtgtgtggtttcgtagaagtttgggtttttatagagttgaattgagattttattatgttttaggttatattagttagaagaaagtcgtttattgttgtttgagtttcgttgttggtgaagaataagttttttagggttttaaatttagaatttatggtttgtgtttttatattgtttaattgaattttgttttttagagtaggtatatttttaatagtggagatttttttagtttgtgtttttgtgttagatgaattagtatttatggaaaagttggagtgttttagaatattttttagaggtagatgagggttattgtttaagaaaaagtttaagtttgtttgtgtttgtttgttaaatattttaaggtttaagaagttagaattttttttatatttataggattgagtagaggtatttgcgagtaagaagttcgtttgagtttttgtgtttagtgattttaagattggtttagtgtttatggtgttaagtttattttttttagtttgagtttggatatgtgaggtcgaaaagaattttttaatattaaaattgattttagggttttgggttgggttagatgggagttgggtgttaggtttaggatttgtgttagataaaagattatgatgatttaatgtttgagtaggtagattatttgataagatgttttttaaattatttaataaatttatggtttgggtttgattatttgttatgttttgtgaaggaagtatattgttttgtgtattgaagtttataattggtgtatattttttaattttttgatttaaagttttaggtttattttgaggtaataaattatgagttattatttttgttattaaattgttgtttataatgttatttgtagtaatattatatgatgaatgaatatttaaaaatgtttttgtatattttagtttggtttatttgtatatggttattcgttggattttgtattttattggtttgagttttttaggagattttattcgattggaaataggtgtttataaatgtattagtttgagtagttatagatgaagttattttagagttgggtaaaaatgtttgagtgtgaatattaatgggaagagatatttgagaattaaataataaattagtttgagaataagacgatatagaggaattagcggtggtttattgtgtagaaggtataaagttttgtgaggtataagatagatttgtttgtacgttgattgaagaaatgtcgtttttttgatatgtgttttttagtttttgtaaagtattagatggatttttatttaagtttatttgaatattagtatttattggtttaatagtaataggattagtaatttagaaaagaagtaggttttttttaagagagtaagtttttgaatttaggtcgaggattagggtttttattgataagggtaggtagtaagtgtatagtttttgtggtagagttttgattaatatttaatattataggttgggttgaggagtcggttgtaggtataaagataggtatgagagaaaattgtattacgggtagtttaagtaaagttattttgggttttggtaaaagtaatttttgaggttatttcggtgatgttgtaagaaagagtttgtttgttagtgttagagttataagagtttttaaaagatggttttagttttatttttgaagtttttagtttttgggtgtttggtttagggattggttggttgttaaatgatttagtggttttgttggataatttttggttttgtatagttttttatttttttttttttattaggtgggtttttgtgttttgtagggatttcgtggttagttcggtagatgtgagattgtaatgtttttttattggcgtagggatagtcgtatgtgtatcggaaggttttgttatagttttttgtaagtttttttaggttttattttgtatcgtacgaattgttgtatttgttatatttgtgtttttttttagtatggatttttataaagtgttgttttacgagagaaaattgagaaaatggtttgttagggtttttggggtagttttcgattggataatagtagaatttcggtatagtttttaaatttttttttattattggattgattgtgttatattgtatgcggtggtttttgattaggtgtatgttgagcgcggggttgttgggtaggattttgcggtagtcgcgtacggtgtataggatgttgggttatgtggtttgggatagttcgtttatttattgttggattagttttttcgttagtacggaggtcgcgggttgttgcgttattttcgcgggtcgcggtcggttgttttttagtcggggtttcgggggtatttacgggttcgaggcggcggcggaggtttttttcgtggtcgtcgggacggcgcgggtattcgtcgttagagtcgtggatttcgtcgtcgttatcgttttcgaggtcgttatggttttcgtagggcggttaggtttagttcgtagttgtgttgatttttttaagtggtgagagatagggtttattttcgtttttttgtatgtggatatttagtttttttgaatattatttattgaagagattgttttttttttagtgtgtgtttttggcgtttttgttaaaaattagttgattgtaagtgtgtttttttttttgttttatttgtttgtgtgtttttatgttagtattttattgttttgtttattatagttttgtagtatattttgaagttaggtaagattgatgtttttagttttgtttttttgacgtaagattgttttggttttttggggttttaatatatatatatatatatatatatatttttttttttttttttttttgagatagagttttatttttttatttaggttggagtggagtggcgcgattttggtttattgtattttttattttttgggtttaagagatttttttgttttagtttttcgagtaatcgggattataggtgtttgttattatttttagttaatttttgtatttttagtagagatggggtttcgttatgttggttagggtggtttcgtatttttgattttaggtgatttatttgtttcggttttttaaagtgttgggattataggtatgagttattgtgtttagtttttatataaattttaacggatttttaaaagatacgaatttttttaatttgtgaatatggggtatttttttattttttgtgtgtttttaattttttttaatattttatagtttttattgtagagattttttatatttttggttaaatttatatttaagtattttatttttttttttttggtaggtattgtaaatgggattgtttttttgatttattttttagatagtttgttattaatatttggtgtatagaaatattaatgatttttgtttgttgattttatattttgtaatttgattgaatttatttattagttttaatagtttttttttagtggaatttgtagggttttttatgtattgtgttatttgtaaatatagatagtttaatttttttttttttagtttggatgtttttttttttttttttttatttaattgttttgggtaggatttttagtgttgtgttggatagaagtggtaagagtggatttcgttgtattgtttttgattttagagaaaatgtttttaatttttttttagtcggtatggttagttgtgggtttgttatagatggttttgtgttgatgtatattttttttatatttaatttgttgatagttttttttattatgaaagatgtcgaattttgttaaatgttttttttgtatttattgagatgattatatgatttttatttttggttttgttaatgtggtatattatttttatagattggcgtatgttgaattatttttataatttaggggtaaattttatttgattatgatatgtgatttttttttatgtgttgttgaattttgtttgttagtgttgtgttgagtgaggatttttgtatttaagtttattagggatattggtttatgattttttttttgtgtttttgttttttatttttagtagtgtttttttgaaagtaatttgtttttttataatttttgtttgtttttaggattttttttttgtttttagtttttgtagttttattgtgtattttattttagaggagtgtgttttgttttattttttagaggttttgttggattgagttttggttatttatttattttggtagttggtttaataattttttttttattggttgtgattttttgtgttatttttttatttttttaatggtgttttttttattgtttaaataaattattttatttaaattttttttttaagattttttttttgggagtaatagggttttttcgatttgaggattaatgttcgtgttgattataatggaatagtgatattgttgatagaaagatattattggttatatttggaagatttttagtttttttaatggtaaaagatttgggaatttgtggattaagatggagtatatatgattttagatagaagtattgttttttaggttttttagagttttttaaaggatggatttgtatggtaagagaagtttttttattatttttaatggggttttatatggttttggttaattatttttttattgtttgaatattatttttttggaatttagtgatatgtgtgtttatttaggaggtagaattaattgatttataataattgttaaacgttttttagagtttattgtaaggttggatgatatgaagattaattttttggaattagttttttagaagatgtaagttttaggtatgtttgatttttattttaaaacgtgtggttgggtataatggattatgtttgtaattttagtattttgggaggttgaggtaggaggattatttgagtttaggagtttgagattagtttgggtaatatagtaagattttgtttttataaaaaataaaaataatattagattagttaggtatggtggtatgtgtttatagttttagttatttgggaggttgaggtaggaggattttttgagttttggaggttaaggttgtagtgagttatgatagtattattgtattttagtttgggtgatagagtaagattttgttttagttagttaataaaatattatatagttatggttaaaaattaaaataaatttttaaaaatttgaatgaataatagagaatgtattaatatgttttgaatttatattaattttgtggagaagaattatttagaattttagtttaattataagtttgtagatgatgatatatgaaattattattttttcgtgaaatataagtgtgaaagatgattatttttttgtggtatgatttttatatattatatttacgcgtattttaaggtttagttgtgtggttttttagtttttattttagttattggttgtgtaaatatttcgtgattgtgtaaaaattatatttgttaatttatatatattgttattggtaggagatagatagatagtgttatttattagaattatatgtgtttttgagtattagttatttaattaggtattttaaaagtttagaaaaaaatttttaagtttgaattttatgtagtaattttgaaaaattatagaaaatagagtaataaaatataaaagtagtagattgaaatgatattttttttattattattatttttagagatagggttttgtttttttgtttaggttggagtgtagtggtatgattcgtagtttattgtagttttaaatttatgggtttaagtagttttttttttttagttttttaagtagttaggattattggtgtgtgttattatatttggttaatttttgtttgtttgtttttttgtgaagatggggttttattgttaattgagttggttttagaatttttgggttaaagtgatttttttattttagtttttttaagtattagggttatacgtttgtattattaagtttggtttgaaatgagatttttaaaggaaataggaaatagtgaataaagagaagagttattggaaattaaaaaaaaaaaaaagtgaaatgttttatgtgtgattaaatagaagtattggatttagattattaataaattaattaagatggaagagtataggaaattttttttggtaagagtttggtaattaagacgttaggggttagagtgaaatatgttgaatgtatgagttaagtgttgggatttagttgatttataagaataaataaaaagaaatttatgtaaatttatataaaatataaaattatggatatttgtattaaagtatggtttgttaatagaatttgtattagtgtatgttaaggttaagttatagttaaagtttatttaaagaatagtttagcggtttttaagtagttgggtaggtaaagaaaattttttgatatatataatttttaagatttgttgtaataaatagttattatattagttaaattaagtttaatttttttttatatatggttttggtaaaggtattatgttatatagaataaatatgatcgatttggataatgaaattgtaaataaaattttgttttataaattattattgttgaaatagtttgtgttttagagaaagtaagaatgtttttagataaaagaaataattattttatttattaatattaaaattaaattatagtattttattttaatgttagaagtatttgttttgtatagagattatgaagaattgggattatgaatttgttgttgataaataaaattttagaggttttgggataaattatgaatttagtttgggagaataggggttttttattagttagaaaaattgattttattattatatggtagtggtaaaaaaaagtttatattaaattttttattttggatatgtattttgaatttttatgtaatagaatagaaatatagttttgtttaggaaaaaaaattgtagaaatattattttgtgtagtttttgtttagaatatgtttgtttttttgttgtatataagaaagagaattttttagtttaattttttgaagagtaatttgaatggtttttatttgggaaattatgtaattttatattaaatagtaggtggtaaggtagttagatggaaatgtttagtttatttagtattattagattgatttgataaatggaatttttttaattttatggaaagtatttttttttttttattttttggtagaggtagatattgtttgtggtttttttataaaagtttgagtgggtaaattttggatgtgtaaatataaatagtagatagagatattgtttttgatagttggaaggatttattgaggattttagaaggagattgttgatatggatgatgttggatagagagatttgagggaggaattaattaatgtgaatataaatgaggaatgtatatgtttagaaaaaatgatagtttttttttaagtttaggttgaggttgttgaaaatttttgtttttgatatggataaaaataataaaaaattgatttttatggataaaaataataaaaaataataaaaaattgatatattatgtggatgagtatatggtatgttttttggtgagtggttttatttcgtatatgatatgtaattttgggtaagatatttgggtaagatatttattttttttttttttagtttttatatttgtatagtgggattgtagggattgagataagtttacggtgtttataattgtttttggtatagaataagtattatgtaagtgatagttgttataaaataataataattattattttggtggattgagaaatttttttaaggaggaagttatttgttttttttaataattttagtatagttgatgtatttatatataaatgagatatagaatttaggagtaaattatttagtgtttaagatgatttataaagatatgtttatattattttttaaaaattaaattgtgaagaatattgtaggtgttcgttattatgttttattaaattttgagtttttgtacgtgttaggaaagtgttgtggttggatattgggtttgatgatgttttttttttttttgtttgaatagtaattagttttcgagatttttttggtttgtgaaatttttgtgtttttacgttatgtgtgtgtgttgttattagattaattttatattattattggaatttttgtttgtatatttgttattttatttagttgtgtgttttttagtttattataaaatgttttaaagattaaaaattatatttttttattagttatagtgtttgttgtatagtaggtgtttttaggtaaatgattgaatgataaataaattatatcggttatgatagtatttaaaagaaaatagttttttttttgttttttttgtaaggagtaaggaaattttttttggaagtttttatattagatatttttacgtattggtttaggatatagttattgataagggaatggaatttttttagttggtttggaaaaggtagtttgtgtttaattataaagattattgtattggttataaaaataatatatgattattataggaaatttataaattaatgaaaagtataataaaataatttggtattatataaagaaaattgttgttaatattgtggtgtttgttttttagtttttggttgtatatgtatatgtttgtgtgtatagaagaaaattgtaattatattgtatatagttttttatagttttatatttaagtttaatataagtagtttttcgtattattaagttatatttttttgaaattagattaatggtttaagtttttttatatggttgtattataaattatataatttattgtttattgttggagatatagattgttagtagttttttattattgtaaataaatatgtagtgaatatttttttatattaattatgtatatttttggttatttttttatattaaatttttagaagtggattaatgagtgaaagggtataaatatatttaaagttttttgatatatttttttgattattttttagaaaatttggattaattatattattagaaatttgtatatgagtggttgtttaattgtatttttgttagtattgggaattttttttttttaagataggattttgttttgttgtttaggttggagtgtagtggtataattatagtttattgtagttttagttttttgggtttaagtaatttgtgaagtattttttaattattgattttatagttaaaagtggttttattttgtttttttgatttgtagtgttattttttatttagttagtatttagtagatgtttgttgaaagaagaaattcgtgttttttgatatgtatattgtttatttatatttattattggtattattatttttgtttttttattgtgatatataaaaagtatataagttgtattaatgttaagtgtaaaattttatataatttatggtattttatttttagtttgttgttttggatattagtttgtttagtttatagtattataataatttataatattattttagttaagtttgttgggtgagatttattttattatagttatattttttttagggtttttaattatatagagattttatttttggttttgattgagaaataaattattttttttttaatttttttatattatttattatatgtttatggtttttttgtataatttttttttttggtaatatatcgttttatttatttttatgtttttttagatattaaaattttttttttttagtatttagaagaattattaaattattttttttttatgtttttttttttattttttggtttagatttattttttttgtgtgtgtgcgtgtttttttttgtgcgtgtgcgtatgcgtatgtttgtgtgtgtgtgtgtgtgtgtgtgtgtatgtgtgtgtgtgtgtgagagagaggagttttagagtttaagtaaatgatatttttttgtgttatttattaatagttataattgttgttgttaatatttattttatttaatttttttttgtttggtaagattggtatatattattgtgttttttatttagagggaagtgaaatattttgggttatattgttaatagtgttgtgtggattagagttgagattagaatttagtatgttagtgatatgtttggattttaagttataaattgtattgggtttagttttgtatataaaaagaggttgaattgaagtttttaagatgttgagaaatttatagtttatttaaatttgagttttgtttttaagtatattttttttttagttatttgtagttagaaaagtaaaagtttttaagtataatttaatatgattaataggaattatatgatttttatagttattttgttgcgtattagtgtttatataatttatgatttgatagtcgattaaattgttttatttattttatattaatatattgtgaatgtagtaggaattggtttagtaaaattttgaaatttttgattttaatatttgtgggatagtaaagtaaataattttggggtttttaggttgtgtgatgtatagttcgtttaggatattaatgtttattttttttgttgattttattgtttttgtgaatagttttgtcgataggtgtttaggtttgttaagagagattatttttagttagtagaggatttttggagaaagatattggtttttatttagaaatataataattaatgataataattgatattgaatgggtgttaaaatgtgttaggtataattttaagtgttttttgtgtaattaatgtattttattatttatagtaattttattaggttttttttattttatagatatagaaacggaggtatagattggtaaaataattttttaaggttatatagttagtatgttatagagtagggatttaaatttcggtagtttgtttttaagttagtttttttaattattttgttatgttgatatttattagatgaaaagaaagaggtataggtgagttataagtggttgtttgtgtttttggaaaatatttgattttatgtttattggtagtttgaaataattaagttgttattatttattaaatttttatttttttgtaaagtgagttatttgtttgtatgtaatattataattggaatatagtgagtaaagtatatttttttatgtttgtataaatttagggtaagtttgtatttttattaaaaaagtggtttttgagaaagaaagtgtttgaaataaaattttgaagagtgggtttagaattagggtgatagttatagagtagtaagttatttggttaatgttttgtaataaatagtagagattgttttattggttttgtgcgttattttgaagagttgaatgttgtagaaatggtaggttaaatgttttggagtaatttaagttgattttaggtagaatttgtttttggtatttttttattttgtttgttattggtatttgttttatttattttttgttattgttagatatggtatggtgtttaataatttttattaattattaataagtttagttgggtgtggtgatatgtatttgtagttttagtttttggggaggttgaggaggaggattttttgagtttacgagtttgaggttgtagtgagttatgattgtgttattgtatattagtttgggtaatagaggaagagttatttgtttaaaataaaataataataaaataagttttttataaaatattaattaatgtttaataaaagggatatttttttttagggtatttgtatttaatagattatttttaaagtttgggttttgggttatttttgagagttggtatttattgttataaattttttttttagaattgtttttgttttattttataggatttggtatgttatgttttcgtttttatttgttttaggatatttttaaatttttttttaaatttatttattaatttattgtttaggagtatgttgtttaatttttatgtatttgtaaagtttttaaggtttttttttttattgatgtttagttttatattattgtggttagaaaagatatttgataagattttgatatttttaaatttaaaagatttattttgtggtttaatatatgatttatattggaaaatgattgatgtgtagttgagaagaatgtgtattttgtatttgttggatagaatgttttgtaaatgtttgttaggtttatttggtttagggtatagtttatatttgatgtttttttgttgattttttgtttaaatgatttgtttattgttgaaaatagggtgttaaatttttttattagtattgtgttataatttatttgttttttgagatttattaatattggttttatgtatttaggtgttttgatattgggtgtatatatatttatttaatattagagtatttaaatatgtaatatatttttttgttgaattgattaattttattattatatattaatataatgattttttttgtttttatttatagatgatttaaagtttattttatttgatataagtatagttatttttgttttggtttttatttgtgtgaagtatttttttttatttatttatttttagtttatgtgtatttttataggtgaggtaagttttttgtaggtagtatatagttgggttttgttttttttttttttaaatttatttagttattttgtgttttttaattggataatttaatttatttatatttaaagtaattattggtaggtaaggatttattattgttattttattaatttttttttagttttgtagattttttttttttttttttttttttttgaggttaagtgattttttttagtagtatattttgattttttgttttttatttttagtgtatttattataggtttttgttttgtggttattatgggatttataaaagtatgttttatagttataaaaggttattttatattgatagtaattttgatcgaaaagaaaatattttttaattttatttttttattttgagtttttggtgttaaaatttatatttttttatattgtatgttttttaataaattatcgtagttattatttttaattgtgttgttttaatttttttaaaaaaatatatgatgtatatattattattatagtattagagattttagaatttgattgtgtatttgtttttattagtgagttatatatttttagatgtttttgtgttgtttattgttattttttttttttattttgaagaattttttttagtattttttgtaagataggtttggtgttgatgaattttattagtttttgtcgtttagaagtttttatttttttttttatttttgaagtatagttttggtaggtgtaatatttttggttgatagttttaatttttttttttttaggattttgaatttttttaggataatgtttttgtttagaggttttttgttaggtatattagtatttttttataaattatttgtttttttttttttgttgtttttaggattttttttttgtgtttgatttttgatattttgattataatatgttgtggggtagtgttatttggattaaatttgattggttgtttttgatttttttgtacgtggatagttatagttttttttaggtttgaaatattttttgttattatttttttaataagttttttattatttttttttttttaaggtttttttttgaatattagtgatttatatatttgttttttagatgttatttataaattttgtaattttatttttttttttttttttatttttagttacgtatttttaattaatttgtttttgaatttattgatatttttttaattgaataattttgttattgatgttttttgttggattttttattttgtttattgtagtttttagtttttggatttttgtttgattttaaaaaattattttaatttttttgttaaatttttttgatgaatttttgaattgtttttttttattttattgaagttagttaaatttttttaaaataagtattttgaatttttgttaggtagtttttttataattttttttttaggattagttattggtagtttatttttgttttaaagtatgtttttttttttttgggttagttggttatttagtagtgttttgtttagtttttatatttgtgaattttttttgaaattttttgtatttatttttaattgttttttttgttattagagtatatttgttatattattaatgtttttttaaatatatgaagatttattttatgatttagtatatgatttgtttagaatattttatgtgattttaagaaaaatgtatatattattgggtggagaattttatagatgtaagttagatttagttggtttatagtgttatttaagtgttttgtttttttgttgattttttttttagttgttttatttattattgaaaatgatagtttgaagtttttagcgattaatatttaattgtttgtttttttttttttgttaatttttgttttatgaattttggtttttagttgtgtatgtttataatggttatatttttttgatggattgatttttttatgattaataaaatgtttttttttatttttaatagttttttgttttaaaatttgttttttttaatattagtatagttataattaagttttttgtttttgtatgtttgtatgatatattttttttatttttttatttttaatttgtttgtattttttattttaaagtgtgttttttatagatagtatatagttagattatgtttttttaaagtttgataatttttgttttttgatgggaatttttttttttttttttttttttttgagatagagttttgatttgttatttaggttggagtgtaatggtacgatttttgtttattgtagttttcgttttttaggtttaagcgatttttttgttttatttattcgagtagttgggattataggtatttgttattatagttagttaatttttgtatttttagtaaagatagcgttttattatgttagttaggttggttttgaatttttgattttaagtgatttatttattttggttttttaaagtgttgggattataggtgtgagttatcgtgtttagtttgatgggattgtttattttatttatatttatgatattattgatatagttggttttatgtttgaatttttattttttttgtatatttcgttttttttttgtaattttgtttttttttttattacgtttttttaagtaagtattatttgttttttttttttttagatagggttttatttttttgtttaggttggagtgtagtggtatggatatggtttattgttattgttgattttttgggtttaagtgatttttttttttttgttgtttatgaaattgggattataggtatgtattattatatttggttaatttttttatttttgatttttttttttttttttttttttgagatagagtattggtttgttatttaggttggagtgtagtggtgtgagttcggtttattgtaatttttgtttttcgggtttaaattatttttatggtttagttttttgagtgattaggattgtaagtatgtattattatgtttagttaatttttgtatttttagtagagacggggggttttattatgttggttaggttagttttttaagttttggttttaagtgatttgtttgtttttattttttagagttttgggattataggtgtaagttagtatatttagttaattttttttatttttttgtagagattttttgttgtttaggttagttttaaatttttgggtttaagtgatttttttgttttggttttttaaagtgttgggattataggtatgagtagtaattgatgtttgtaagtgaatattttataatgtagtattttaatttttttaatgatgtttttattattttttttgaattttttttttttagtggttattttagagtttgtcgtagaataattatcgtgatatatagaaatgttatttttatatatatgatttttgatttatgttttatatatatgattttcgatttatgatggagttatattattataagttgaaaatattgtaagttagaaatttatttaatatatttaatgtagtgtatattattgtttagtgatatcgtgtattgtagagtgttatttgtttatttttgtgattgttgggttgattgggagttgtggtttgttgttattgtttagtattgtgagaaaagtatatttgagaagaatgtatgttttgttgttgggtggagagttttatagatgtttgttaggtttgtttggttatagtgttatttaagtgttttattttttcgattttttttttagttgttttattagtagttatggtattatatattagtagtttgggaaaagagtaaaatttaaaatttggagtatggtttttattgattgtgtattatttttatattattgtaaagttaaaaaattgtaagtttaatttttataagttatggattatttgtatagttttatttttttttttttttttttttgtgatattattgttatatatattattttttaatgttatgaatttaataatgttttaattattattttaatatgtgtagttatttttttagtttaatatagtttggttgtttaatttatttgtattgtgtttggtaaatatatttatatattttatttttttttatatgttataggtttaatagtatagtgtgtatatattattttatgtaatttatttttatgttagttatgagaataagagagaaaaaatgtgtatttataattatataattattagtgtttttttattgtgtggatttaaattattttttggtattaatttatttttttttgtaaagtgggttttttagtaataaatttagtttttgtttttttgggaaagtttttattttatttttatttttgaaaggtagttttgggggatatgggatttttggttgataatttttgagtattttgaatatgtttttttatgtttttttgggattttttgtttttgttgagaagttatttgttaattttattggggtttttttgtaagtaatgggttatttttttatttttgtttttaagattttttttttgtttttgatttttagtatttttattatagtgtttttgtttgtggattttattgtatttattttatttggggtttgttgatgtttttaagtgttaataaatttggggagtttatatgtttttttttaaaaattattttatttttaattggtacgtaatgtgtatatttatagggtgtaatgtgatgttttaatatatgtatatattatgtattgattaaattaggatgattagtatattcgttatttgaaatattgtttttttgtggtgagaatttttaaaatttttatttttagttattttgaaatatgtatatattatgtttaattttttttttatttaggaaaaaaggtgtagtttattatttagcgtttatttaattttatattaatgtgttttttgaggttgaagtaaatttgatagatttttaatgtgaaaataaaatataaaaattgtttttggagttatttttaaatagaattaatattagaattgtttgaattattagaattatttattttagaaaaattgaattgaaatggatttttggttaataattgtttaagaataatgttattattatgcgtaggaatgttgtattttttaggatttgatatttttagcgattgagaattattatattttgtaaatggaaatattagtgttaaaaatagaatgttataaatagaatgatgttttttgtttttaaatttaatgtattagagtttgcgaaaatagtagtaaaagcgagtaaagttattttagagtagacgttgtagttttatgtattgtgggcgagtattttttgggtaaacgggaaaagggttaattgtagttaatttattgtataatagaatataagaattttttttttttgtttaattgtaattttgtattggttgatgaatcgataattatgttttttaagttcgtggaaaatgttttagatttttaattatagttagtaggtaaaagtatttatattttttttttgatttttgttgttgtcgtttttgagattttatttaaattaatgtggtgaagttttttgagtattgttagattagatataatttttggggtatgataaggaatgagtagtagtattttatgaagttttaggttaggtatatatagaaataattatgttgttatttgagattgttttgtttttaaataagtggttttgaagatgtggtaggtaagggatagagaaagattaagttttttgtgattagaaaaggattatttgttatttagaggaaagggttagagaaaagttggtttattgaattaatgtaagaaattagaggtattgttaggatattttgtagattaagttagggtgaaaatatatttaagaataaatttagtaattgagaaattttatgttttgaatgtgagaggtaattttttatatgaaattgttagttgacgttgaaaatttatttattttggtggttgggttaggaggagatttaagaagagtttttgtatttagttttttggtggttggagagtttaaatattagatttggaagtagataatattttatagtataaggaataggaattttttttattgtttggaaaaattaagtatttggttgtttgattttagtgaaattgtaatttagggggaattgattaattttattagatagggtgtgagttttgtggtttttgttaggtgtaattgagatttatttttgttttttttttttgtttttgttatttatgatttttatgtttagagtgtgtagagtaggtttgtatttttttttttttttttagagattgaggttttgtgaagttgtttaggttggatttgaatttttgggtttaggttatttttttgttttagttttttgagtagttgggattataggtatgtattatttagttaggtttgggttttgtttggttatatttttttttatttttgttattaaggtttgtagttgtcgttgattttaatagattattttttagagtagttttaggtttatagtaaaattgagtagaaagtatagagattttttttatattttatgtttttatatgtataatatttttttattgttaatattttttattagagtggtatatttgttaaaattgatgaatatgtattgatatattattattatttgaagtttatagttaatattagagtttatttttggtgttgtatattttatgggtttggatagatatatatgtgttcgttattatagtattatatagaatagttttatggttttataaatttttcgtgttttatttatttattttttttttttttttgttcgagtggaatttttgtttttattttattttattttttgtttatttatttttttgagataggtttttgttttgttatttaggtaggagtgtggtggtataattatagtttattgtaatatttattttttaggtttaggtgatttttttgttatagttttttgagtatttgggagtataggtatatataattatgtttggttaatttattttttttttttttttttttttgtagagatagggttttggtatgttgtttaggttggtgttaaatttttgggtttaagtaatttttttgttttagtttttgtaattttaaagtgttgggattataagtatgagttattacgtttggtttgtttttatttttaaaaattatttgaggaattggttttaattttagttttgtgttgaatttgtattatatatagtttagagaatttttatttatgtagggattgtagatattttttttttattttttttttttttttttttttttaaataatggtaagttagtgtttatattgtgtattagtttattttattttttgagatttttttgatggtttgttaatttggagatatttttggataaatgataaatttttggtagtataagtttaaagtagtaaggttttgttttagatattggagttagaatgaaatttaaaaatggttttttgtttttatattgttggtgggagtgtaaattagtttaattattgtggaagatagtgtggaaatttttgaaggatttagaattagaaatattatttgatttagtaattttattattgggtatatatttaaaggattataaattattttattataaagatatatgtaaatgtatgtttattgtagtattgtttataatagtaaagatttggaattaatttaaatgtttatttaatgatagattggataaagaaaatgtggtatatatatattatggaatattatatagttataaaaaagggtgagtttatgttttttgtagggatatggataaagttggaaacgattatttttagtaaattaatataggaatagaaaattaaatattatatgtttttattcgtaaatgggagttgaatagtgagaatatatggatatagggaggggaatattatatattagggtttgttagggggtgagggatttggggagggatattattagaagaaatatttaacgtagatgacgggttgatcggtgtagtaaattattatggcgtgtgtatatttgtgtaataaatttgtacgttttgtatatgtattttagaatttaaagtataataaaaaaattaaaaaatggtttttattttttatttataaattatgattattttatttaaagattataaattttaaagtgatataatttttttgggtagttttaattaaaagagttgtattatttttgagtttttttatgtatatgttaattattttttttttgttatattttgttttgaagtgtttgtttagatagtagtatttattaattattaatttttgtgggatgagtaattgatttcgtagaaaattatttaaagggtttgttggttggattgagttaattatatttttttttttgagaatggggattttgagatattgagttgattagataatggttagtttttgggttgaaatttcgtatagaattgtgattattttttgaattatagtataaaagacgtgtaagttgggggaataaaaaaagttatagatagtagagatagtagaggtagttagtgtatagagagatgtgtttgaacggagtagaaatgtggatattttgagatgtggtaggagtttttagttttattttttatttggattagttaaattttttttttttttgggtgttgtttatgagatttttggttatagtttttttataatatttttttttttatttgatttgtgttagttgagtggatttttgttttagagttgaaatgtagtgttagtagaatttagtgtaatagagttttatgtaattaaagttttaaagattttttgggttgtgagatatataaaaagatagaaaattaaggttgataattagtataaaataattatatgttggggtattttttagttagttaatgttttttttatcggtaggtatttagtgattcgtttattatttttttttcgtcgaggttaaagaatgtttacgttattttatttttttttaaaaaagaaaaatattttgttgttttttgtttttttattgattatatttgtttttaatttttttatataattttaggtagaatattagtttaggtgttaggggatgtgggttttgtttttgttggggttttaacgggatggatggtttttgtaaggttttttatttttttgtatttttatttttatatttttgtcggatagtgaagagttatgttgattatcgatttttagttgataatttttataaaataaggtgtgaataaagagtgtgaagaaattaagttattttataggtatttgttatagatgaaataaatatgtttattttttatttaatgatgttaattttaagaattttgttagtaagtgaaaagttagaaaatgaaaaattatttttgttaatttttttgttgttgttttggttttgttttttgagatagagttttattttgttatttaggttggagggtagtggcgtgattttttagtttattgtaatttttacgtttcgggtttaagtaattttcgttatagtttttcgagtagttgggattatagatatatgatattacgtttaattaattttttttatttttagtagtgatagggttttattgtgttggttaggttgggttcgagtttttggttttaagtgatttattcgtttggttttttaattgtagtcggttaatttatgtttattttagtggtaaaagttatgatgtgttttattttaatttaagatgtttaaatattttttataaatagaaaaatatattattgagtaatgaaaattttttattagtaaataatttaaaattaaataaatgtaattggtatataaaatgtgttaaaatgatgttttgttgttttaataaaaaagaggaggcggggtcgggcgcggtggtttgtgattgtaattttagaattttgggaggttaaggtaggcgaattacgaggttaggagatcgagattattttggttaatatggtgaaattttgtttttattaaaaatataaaaaaatttagttaggcgtggtggcgggtgtttgtagttttagttatttgggaagttgaagtaggagaatggcgtgaattcgggaggttgagtttgtagtgagttaggatcgcgttattgtattttagtttgggcgatagagcgagattttattttaaaaaaaaaaaaaaaaaaaaaaaaaaagaagaggtttgatgggattgatggaagagggaaggagttatattttggaaggtggttggtgagttaggtgataaatttttaaggcgtgtatttagtagtaaaagtgtttaataatattttttattggggattttgatagtagaagaaatttttaatgtggaaatttttggtatattggtagaagggaatttttagattaaaaaaaaaagtaagatgtaattttgtttttttttttgtaatttgtaatttatatatttttttgtaggatgcgatattagtttttcgaagttgttatagtaaattattataaatttgttggattaagagaatagaattatattttgttgtagttttggaggttaaaagtgtgaaaattgatatggttatattttttttggggatattttttttttatttttggcggttagtatggtatttttgggtttgtggtcgtatttttttaatttttgtttttgtttttattttgttgttttttttgtgtttgtttttaatttgttttgtttttgttataaggttgtatgtggtttattttattttgatattttaggataagtttttttttttaggattttgaatgttattattttgtagtagttgttgttgtataaggtaatagttatttttttgttatgtaaagtaatatttataggttttatgtgttagtgtgggaatgaggtgtcgatatttgggttgttaattttttgttgtgggagattgttttgtgtttggtagatgtttagcggtgtatttggtttttgtttattgggtgttagtgatattttttttttagttgtgataattaaaaatgtttttaaatattgttaagggttttttttggggtacgattgtttttggttgatgagtattgttttaatttaattagagtttatttttattttatttaaatatgttgattgggaagtttttagtttcgttaagaagggggagggtggagaatggatgttggagaggtgattgtttttttttattatatttaatattttagtgaagtttataaatgggttaaatcgagtaggattatgaaatttttgttagatttttgttagtgtattttaatattgtggtattttatattagttaattaaattttaatattatgttttaaaaaaatttaatggatttttgaatttttaggttgggttttttttattttatttatgttaaatatgttaaatatttaggttgttttttattttagaatttgtttatgtattattttatttttttttagtaggtttttttttggaggtttttatatttagttggatttattttttttgcgattgttgtttgttttttgttttgttatgcggtattagtagagtatgaattgtatatttagtatagtagtttatgtattagagaattaggattggaatttttttgaagtattttatttttttgtgaaataattgaaatagagtatagatatatttgttgttttgaagtttttatgatttttaaagtaataaatgtgtatttttatagttttcgggtggttgatttttggagtgtttgtcgttttttcgggtggttgttttgtataggtttttttttcgtgttggtttgtaagtgttttcgttgcgacgggtttttgatcggtattggatgagaggattagtattggtgtagatgttggtataaataaaagttgtagttttttaattatgattaaggtatgggagaggttgatatataattgtggggaaaagcgagagagattagattgttattgtgtttgtgtagaaagaagtagatataggagattttattttgttatgtattaagaaaaatttttttgttttgagattttgttaatttataattttatttttaatttcgtgttttttgaaatatgtgttgtgttaatttagagtggaatggattaagggcggtgtaggatgtgttttgttaaatagatgtttgaaggtagatgattaataaatattaagggaatttagaggttggcgggattttttatatgttgaacgttggtttttcgggtttttttatttttttttttatattttgtttttgtgttttttttttttttaaatttttcgttttattttacgagaaatatttataggtgtgtaggggtaatttatttttataataatggtttttagagtgttttttttagattaataaaatatagtaaaattacgtgataattaggttggaatgtatgtgaattgttcgagtgagtttgtgttatttgaattgtattgggtagtatttaggggttttatgtaaggtatgaagggttttagaaagaattcgttttttgtttttagttgtattttatatgtttaatatatagtatagtagaagtaattagttttttttaatgttatttattttataaattatttttttttatatttacgtatttttttttgtatttaattttattaatggattatttgatttttagttttgttggtttagaatttttgtgtttattttaagttttttaaggagaaaaggattattgtaattattttttaacgagtttgtaaaaataatttttttattatagtattgtgttttatagggtttaaaatttgatcgaatgattgattttatatatattttttttagattttttaggattattgtttttttagaggttttttttgttttttggaaaataggtaggggaagagggatttagaaatggtagtatttattaagatagttaaagtttgataggaagagatatttattttattgtggtaattaaagtgaaaatgggagaataagaaggtatgttgttttttttttaggagttttggtaagggttttagttttaaaagaaagagatatagttaattagattgaaatgatgtggagtttatttttttatagttatattttattgagttattttttaataaatggattaaattgttttttggaatttagtaggtggtgtttttgtgttatagtatagtatcggttttggagaggttttgagagtatagcggttggttttagggtttgtgttttgttagtttttttttatagttgttaggtatatatttggagggtattatatggttggtttggtgagaggttttttgtttttggaaatgagggggtgaattaaggtttttattttttttagtttgtttgagttttgttttttaggggaatttaaatgagaggttttttaattttttaaagaaaaaaaaaatgtgattgtttatttaaataattacgatgtgtattgttattagttttttaagattttttatattgttatttatttgtgattttttaaattaaagtttttttttatataatttagggtattatttttgtttatgtttttttttatgttaatgtttgttttttgtttaagttttagagaagatgtagtagaaagaaataaatatgtagtagagaaatttggaagtgatgaaggaatataggtgaaagttatcgagtttatgtagtagttagtagtaatttagttgataatagatttttttggtaggagtttattgttttattttttttgttatataatgagttttttggttcgaagttggttgtgatattatgatggtgaataaggaatttagttaagtttatatttggtgatgttggagaagtgtggtgggtaaagaagataaatttaaatttagagtgagttatttattataaggaggataaatttgttgtttgaagtattttagggtttgtttttttattaagtttttgtaggggttgtataaaacgaaagttattttatttatatttattaattggtaggggagaggtaaaatgttagtgggatttatagtttggatgtgttgatttgatttatttagttatttgtgatgtcgaaaggttattagttaggttcgagtgaggttaggttgtggggttagtagttgggtttttgagttgtgttgttgtagatttagtgatgtgtagtgtgttttgttaagatagagtgttttttttttagtttattgtttagtattttgtgtattgagtttttaggttttaatgatcgtagttttgatttatatattttgtagttgatttttttttagttattttttaattttgtttttttaatttatatttttttattttttaattagtttttttaaaaagtattttaaatatattgatttttgttggttttaaaaattattttaaatatattttgttgggattattttagtgttttaagtatattttgttaggattttttagtatttaaatatatttatttgttggattgattaattttatttgaagtgaatttgtgatttaatgtttgatattgttagttgtatttatttttttatgtattttagaattttggttaaatgatatgttttgaatgaggttttaaaaattttttatttatttagttatttttcgtttttttttttttttttgtatatttttttttgtgtagttttattttgtttgtttttgtttggtttttatggagtttgggtgtagaattagtttttatagtgggggtttagttatttgggtatttatggttgttttacgtagtgtttggttttgtttgataggtgttttttattttttttagatcgttattttataggaggtaaggatgttgcgagtttttttttaggtatggaggggtagggttttagttagtattttttattttattttttagtaagggtgttagttttttattttgtcgtttgtgtttttgtttagtttttaatttttttaagatttaaatttatagttttattgtttgtttttggattttagtataggaggggttggttgtttatggttttgttttcggggttttgtttttttgtgtttttgtttcgtatcgattttatagaaatgtttattttgtgtgtgtgtttgtttgtatttttttttttttttttttttatgtttttttttttattgttgtatgtttggagtaaagagaatttatttaaaagtgaatttatcgtgttattttaattggaagttatatgggtagagagtttaaaggaaagaaagatatttggttttatatagtattgaaagttaattataagaacgttttttatgtgagtttagtgatttatagtatatagttatttaaatttcgtttgaggtttgtaggttttaaaagatgagtgggattaggtaggtgggatttattagggtgttatggttttttataaaggttttattttttattttttattttggtggtaattttttaaaaatttataattttatatatttaaatgtttgtaattttaattaagtaatgttttaaaattttagtgtttggagttgtgtttgtattggtgttaaggagtattgttttaaatatagggagatattataaaagaatagaggtgaaaatgtaaataacgtgtttgagttaagagattgtcgttgtatagtggttttgaagaggaaagtgatgcgtgaattaagttgtttttttgtatgtgttagtattggttagttaatagaatttgtttgtcggtattaagttttatatggttagtttaaagtgagttttaatgattgtattattgattacgttgaattaattttgttaatttaaattttatttattttgtagatttgttggtatttaatttgtatattttttatattgtggttgtgtaagagttataagtataaaggttttattggtttatgtttgttaatatttaattaataagaagaatgattttagataatattgggagtttttaatagtttttaagtttgagaattatgggttaaatggtaatttaatttttgttgttggttgtagtaagtattttgtatttgattttgatgtttttagtttatttttgtttatgttttttgatttgtttagtttaggatcgtttttttttggggattttgatatttttatgtcgggttggtgttttttttttatgttgtttgtagttttttgtgttttttttttttttagttttttttatagtgtaatttgtgtatgggttttaatttttttattagttataagttgtttgagagtggggaatattgttatttttttatttgtagtgatttttagagtttttgttataaaataggtttttaataaatgtatgggtttttttgtttttgtttaggtagtaataaattatttgtagaattaaggagagaaagaggtagaaataatttggagttaagttataaggtaagaagaagttttttaatattttaataattaatgtgttttttagtttattttttaattggtttaattaaaatttaagttttattgttaggtaagtgaagtgaggataagaaacgtaaggaaaggaagtaatgattgtaatagaatgtatgagggaaggttggtattttttaagttcgaatgatggttttttggtgttttgatggagaataaggttagagatttttgttttagtagtttcgatggtaagcgttgtggtgaagggatgtttttattttgaagttaagtttagagaatagtttttttttttttattgttgaggttttgggtgggagaattgagtttagtaaatttttagagttatttgttagatttagtttttttaattttttgtaaagttatttgaagagtatatatatatattttgtatttggattgaagttgttttttttaattttttaggtttagattttgtttataattgaggtttgtttgaaattatttgtaaattttaggtttgtgtttttgattagattattttagaggtggaacgttattgatttaatagagaaatagttagttttttttagtggaattttttttaaaattttattggttttaggaggaaaaatattatttgttttttttataagtatttaatgggaataagaattttttattgtgatttttaaaaaaaaaaaaaaagttataaatataggggtaaattgattagttttattttgtgaagtgaagtaaagaaatattatattttagtaaattaaaaatagttattaggtttttattaaggaagaggaagaattttgttaatttaagtggaattgaatataaattttttaattttatatttgattatattttagggggttttaaatattttttgataaggttatggtgtttttagttgatgatattgattgattggaagttaagtatttgatttgttttttttttttttttttataattagtgtgttttgtagtattttttttatatattttttgtttggtgtttattttatgagagaaaggattttatgttgagggtaaatgggaaaaaagtgtattttattaggtcgtttttattttgagaagtttatatggtttatatttggtatgagtagatttagttttttgggtttagagatgttttagattaaaggaaagtatttttagatttttttgtttttttgataggtattatgtatagttatttttgtgtggtttaaaatgagttttgttttaaatgttaataattttggagttataggggtttttattaatataaaattagttagaattttatttgttttattttttttttataatagttttgttgttttttttatgtatttattttttatatatttgtttagtatatatttattatgtttttataatgtgttaagtattgtgtgagtttgtgggttttaaaatatgtttagtaaattaggttttgagatgtgttagttaggatgtgtttgattgtaagtaataggaaagttaaagaatggtgttaagggattaagtaaaaagagtagttttatatttggtttttttattgttttaattatgttgtgaggatacggggttgtgatttttttttgttgtttgtagtatgttggttagtttttttaggtttttttatttttgggttttaaggtgattgttatcgttttgagtattatataaagattattatgttagatatggaaaaaagtgaatttatttaaaattgaggaaaattgagaaattttttgttgaagtttagtttttatgttttatatttttataatatatttgtttttatagtttgataggcgagtaaaagtaaatattatgattggtttgtattagttatttttaaaatgtggttgagggtttagggttttcgagatttttttaggaggtttataagggtaaaattatttttataataatgttaagttgttatttgttttttcgattcgtattcgtttattagtgtgcggtggcgttgttaagaggttatatgatagatgatgatgatttttttttgatagttaatggaatgtgtgtttgtatattttgtttttttaattgtttttagttttagtttttggtggtaaatatttatttatttatttatttatttatatttatatatatatagatatatatatatatatatatatatatatatatatatatatatatatataaataaaattttttggggtttttagtaatattgaaggatgtaaatgggttttgagaataaaatatttgaaattatttgttttgtgtgaattaagatttatttttggtattggcggatattttagtttttttaagatatatggttttgagatttttggataaaatttttaataaagaggaaatggagagtttagggttgttgggtgggtaattagtagtgtgtgtagttttgttttgagggggttttgaggagatagtagggtagggatgtagtatgttttttaggttttatttttgttgggttagttaggattggagttattgtaggtttgttatttgtgtgttgttggttttttaattgtggtaaatataaataagattgtaattattttaattatttttatatgtaatttagtggtattgattatattaatattgtttaattattgtcgttatttatttttagaattttttcgttattttaaatagaaattttatttattaagtagtaatattttattattgtttttttttatgaattaatttgtttttgtgaatttgattattgtaggtattttatttgtgtggaattaaagaatatttgttttttcgtattttgtttgattttatttagtatggtgtttttaagatttatttttgtatgtattagaattatatttttttttaaggttgaatgatattttagtgtgtgtatatgttatatttcgtgtatttttttttttattgatggatatttgagttgtttttatttttggttgttacgttgttatgaaattgggtgtataaatatttttttgaaattttgtttttaatttttttgggtatatatttagaagtgggattgttggattaatggtaattttatgtttagtttttttaggaattattatattgtttttcgtagtagttgcgttattttatatttttattagtagtgtacgagagttttggtttttttgtgtttttattaatatttgtcgttgtttttttgatagtagtcgttttaagtgaagggagatggttttttgtttgtttttaatgaattaggatgtattgttttagtttgttatttagcgttttttttttttttgttatttttttttagatattgtttaagtgttttaatgtttttatttttttttgtttttatgaattgtgtttggtgagttttatatttttgtaaggtatattttttatgaagtttttgaatatattttttttttaaaggatagaatttattaaaatgaggaatttttagttttgaggtaatattttttgttgtttgttgtattttgaatttgagttatgttatttcggtgatttagattatgagtttttgtggatagtggtgtatttttgtattatggttatttgagtttataaaatagtatttaataagtaattaaatttttgagtaatttatatgtgtgagaagaagggtaatggtagtggttttaagttgatgttattgtgaattggtttttttttagtattttggatgtttgtatggttttatggttggttttttttggtattttattttagttttttatttttttttgtttttgaaggattcgtttttatttggtaggaaatagggataggattaagtatgtgtgggttttttattggatattgttttttgttttagcgtttgtatttttttgtttatacgattttgttttagttttttttgtataggaatttttgaaggtttttatttaatttttttatttttttttggaaatatttattgagggatttaatagtttttgttgtttttagtttgtatacgtggagaaggtgaaattatggtttgttttgattttttagggattgggtaaatgtattaaaagatatattatgtaagaaatggaaaaagtggatttttttttgattttttatgttaattgtttttgttgtattagtatatgttgtgcgtgtatgtataaaatatttgttaatattttgagtttttaggaaatatgttataaaatatttattttttttattttttaaaaatgttaaatagtatttttttaagagttagtaatgaaatgaatttaggtatatatattaggtagaattataagaaagttaaggatttatatttggagtaagataaaggattttggtattgagtaaaaaatatagttagttgttaattgtttaataggtttgtagattatttgcgataaaaaagtagtatatttgtgaaaaaagttgaaattattataaatttgaagaattagttttattttttaaggtatgtattttttggagttgtacggaagttattttatatgtttgtttcgggtgatattgttttattttttcgtgaataatgaattgaacgtttttttttttttgtgataaagttttttggggtaaagtagtagtcgtataggtaagatagggggtttagatagtaggttttggatttttttttttttagagttaggattggaaaaatggagttattatttgaggattggaaggaaaaggagggagtaagtgttaggattgttatttttgtttattttggtgggtggttttaatatttttagatagagaatttagttaaaaaaataaataaatagaaaatatatattattttaataatttgtaaaattttgttgtatttattaagtattgtttatttttatttatatttataaattataatattttttttttttttttttgtttgtggggtgatgtttttatggtaaatgtgtatttggaagttttttttttttttttatattttaagttttgagatatatgtgtagaatgtgtaggtttgttagttaggtatatacgtgttatggtggttttttgtatttattaatttgttatttatattaggtatttttgttaatggtattttttttttagttttttaattttttgataggtttcggtgtgtgatgtttttttttttgggtttatgtgttcgtattgttcgatttttatttatgagtgagaatatgtggtgtttggttttttgtttttgtgttggttgttgagaatgacggttttcggttttatttacgtttttgtaaaggatatgaatttagttttttttatggttgtatagtattttatggtgtatatgtgttatattttttttatttagtttattatttatgggtatttgggttggttttaagtttttgttattgtgaatagtgttgtaataaatatatatgtgtgtatgtgtttttatatagtaggatgatttataatttttatatatttagtaatgggattgttgggttaaatggtatttttggttttagatttttgaggaatttttatattgttttttataatgattgaagtaatttatatttttattaatagggtaaaagcgtttttgtttttttatatttttttcggtatttgttgttttttgattttttaatgatcgttaattttaattggcgtgagatggtgttttattgtggttttgatttgtatttttttagtgattagtgatgatgaatttgtttttatatgtttgttggttgtataaatgtttttttttgagaagtgtttgtttttattttttgtttattttttgatggggttgtttttttttcgtaaatttgttttaagttttttgtagattttggatgttagttttttgttagatggatagattgtaaaaatttttttttattttgtaggttgttcgtttattttaatgatagttttttttgttgtgtagaagttttttagtttaattagattttatttgttaattttagtttttgttgttattgtttttggtattttagttatgaagtttttgtttatgtttatgttttaaatggtattgtttaggtttttttttagggtttttatggttttaggttttatatttaagtttttaatgtattttgagttaatttttgtataaggtgtaaggaaggggttttaatttagttttttgtatatggttagtagtttttttaatataatttattaaataggggattttttttttattgtttgtttttgttaggtttgttaaagattagatggttgtagatgggtggcgttatttttgaggtttttgttttgttttattggtttatatttttgttttggtattagtattatgttgttttggtttttgtagttttgtagtatataatttgaagttaggtagtgcgatgtttttatttttgttttttttgtttaggattgttttggttatatggatttttttttggttttatatgaaatttaaagtagttttttttaattttgtgaagaaagttaatggtagtttaatggggatagtattgaatttataaattattttgggtagtatgattatttttatgatatttattttttttattcgtgagtatggaatgtttttttatttgtttgtgtttttttttatttttttgagtaatggtttgtagttttttttgaagaggttttttatattttttgtaagttgtatttttaggtattttattttttttgtagtaattgtgaatgggagtttatttatgatttggttttttgtttgtttgttattggtgtataggaatgtttgtgatttttgtatattgattttgtattttgagattttgttgaagttgtttattagtttaaggaaattttgggttgagatagtggggttttttaaatatataattatgttatttgtaaatagagataatttgattttttgtttttttatttgaatatgttttatttttttattttgtttgattgttttggttagaattttcgatattatgttgaataggagtggtgagagagggtatttttgatttgtgttagtttttaaaggaaatgtttttagtttttgtttatttagtatgatatttgttgtgggtttgttataaatagtttttattattttgagatacgttttattaatatttagtttattgagagtttttagtatgaagggatgttgtattttatcgaaggttttttttgtatttattgagataattatgtggtttttgttattggttttgtttatgtgacggattgtatttattgattggtatatgttgaattagttttgtattttagggatgaagtcgatttgattgtggtggataagttttttgatgtgttgttggatttggtttgttagtattttattgaggattttcgtattgatgtttattagggaattggtttgaaattttttttttttgttgtgtttttgttaggttttggtattaagatgatgttgattttataaaatgagttagggaagagtttttttttttttattgtttggaatagttttagaaggaatggtattagtttttttttgtatttttggtagaattcggttgtgaatttgtttggttttgggttttttttggttggtaggttattaattattgttttaattttagaatttgttattggtttatttagggatttaatttttttttggtttagttttgagagggtgtaagagggtgtatgtgtttaggaatttatttattttttttagattttttagtttatttgtgtagaggtgtttatagtattttttgatggtagtttgtatttttgtgggattagtggtgatattttttattattttttattgtgtttatttgatttttttttttttttttttttattagtttgattagcggtttatttattttgttaattttttttaaaaattagtttttggatttattgatttttttgaagggttttttgtgtttttgttttttttagttttgttttgattttagttattttttgttttttgttagtttttgaatgtgtttgtttttgtttttttagtttttttaattgtgatgttaggatgttaatttagattttttttgtttttttttgtgggtatttagtgttataaatttttttttaaatattgttttcgttgtgttttagagattttggtacgttgtgtttttgtttttattggttttaaataatttttttatttttgtttttattttattatttatttagtagttatttaggagtaggttgtttagtttttatgtagttgtgtagttttgagtgagttttttaattttgagttttaatttgattgtattgtgatttgagagattgttatgattttcgtttttttgtatttgttgaggagtgttttatttttaattatgtggttagttttaatagaagtgtgatgtggttttgagaagaatgtatattttgttgatttggggtggagagttttgtagatgtttattaggtttatttggtttagagttgagtttaaattttgaatatttttgttaattttttgtttcgttgatttgttttatatgatagtggagtgttaaagtgttttattgttattgtgcgggagtttgagtttttttgtaggtttttaagaatttgttttatgaatttgggtgtttttgtattgggtgtatatatatttaggatagtaagttttttttgttgtatttatttttttattattatgtaatgtttttttttgttttttttgatttttgttggtttaaagtttgttttattagagattagtattgtaatttttgtttttttttttttttttatttgtttggtaaatatttttttatttatttattttgagtttatgtttgtttttgtacgtgagatgggtttttttatagtatattgatgggttttgattttttattgaatttgtaagtttgtgttttttaattggggtatttagttcgtttatatttacggttaatatttttatgtgtgaatttgattttattattgtgatgttagttggttattttgtttattagttgatggagtttttttatagagtcgatagtttttataatttggtatttttttgcggtggttggtattgggtttttttttttatatttaatattttttttaagagtttttgtaaggtaggtttggtggtgatagaattttttagtatttgtttgtttgtaaaggattttatttttttttcgtttatgaaatttagtttggttggatatgaaattttgggttgaaaattttttaagaatattgaatattggtttttatttttttttggtttgtagagtttttgtagagagattcgttgttagtttgatggatttttttttgtgggtaattcgatttttttttttgattgtttttaatatttttttttttattttaattttggtgaatttgataattatatgttttggggttgtttttttcgaggagtatttttgtggtattttttgtattttttgaatttgaatgttggtttgttttggtaggttagggaagtttttttggatgatattttgaagagtgttttttaatttggttttattttttttgttatttttaggtatattatatattaattaaacgtaggttttgtttttttatatagtttcgaattttttggaggtttagtttgtttttttttattttttttttttttaattttttttttatgttttatgttattaagttgatttttagtttttgatatttttttttttgtttgatcgatttaattattgatatttgtgtatgttttacgaagtttttatgacgtgttttttagtttaattaggttatttatattattttagttagtagtttttttaatttttttttaagatttttagtttttttgtattgggttaaaaaatgtttttttagtttggaggagtttgttattatttattttttgaagtttatttttgttagtttgttaaattaattgttcgtttagttttgtttttttgttggagaggagttgtgattttttgtaggagaagaggtattttggtttttggaatttttagtttttttgtgttggtttttatttatttttatggatttatttatttttggtttttgatgttagtgattttcggatggggtttttatgtagacgttttttttgttgatgttgatgttatttttttttgtttgttagttttttttttaatagttaggtttttttgttggagtttgttggaggtttattttagacgttgtttgtttgggtattattagtggaggttttagaatagtagatattgttgtttgattttttttttggaagtttcgttttagaggggtattcgttagttgttagtcggagtttttttgtatgaggtgtttgtcgatttttgtttggaagtgtttttttgttaggaggtatgcgggttagggatttatttgaggaggtagttttttttttagtagagtttaaatgttgtgttgggagatttgttgttttttttagagttagtaggcgggaacgtttaattttgttatagttgcgtttatagttatttttttttttaggtgttttgttttagggagatgggagtttgatttataagttattgattggggttgttgttttttttttagagatgtttagtttagaaaggaggaatttagagaggtagtttggttatagcggttttgttgagcgaatatttttgcggttttgtttacgttgttaggggagaatcgtttttttaagttttagtaatgggggacgtttttttttttattaagtttaagtattttaggttgattttagattgttgtgttggtagttagaattttaagttaatggattttagtttgttgggttttttgggagtgggatttattgagttagattatttggttttttggttttagtttttttttgaagggagtgaacggttttgtttcgttggtgttttaggtgttattggtgtatgaaaaaatttttgtagttagttcggtgtttgtttaaatggtcgtttagttttgtgtttaaaatttagggttttggtggtgtaggtatttaagggaattttttggtttgtaggttgcgaagattatgggaaaagcgtagtgtttgtgttggaatgtattattttttacggtatagttttttacggttttttttggttaggggagggagttttttaatttattgtgttttttgggtgaggtgatattttatttggtttttgtttatttttcgtgggttgtttttattgtttaattagttttagtgagatgagtcgggtattttagttggaaatgtagaaattatttgttttttgtattgattttgttgggagttgtagattagagttgtttttattcggttattttgttagtttgtggaggttttaaaaattattttttaattgtagaaagtaatatattgaaaagtatataaatacgatttatattttggtgagttattaaaatgtggatagatagttattgttatataggttaggaaatagaatattgttagtattttggtgttatttttgtatatttttttaatagtatattttttttttttttaaagtagggttttttaagtttcgggttatagatcggtattagttcgtggtttgttaggaattagattatatagtaggaggtaagtagtaggttagtgagtattattggttgagtttcgttttttgttagattagtggcggtattagatttttataggggtatgaatttttttgtgaattgtatatgtaggggatttaggttgtacgttttatatgagaatgtgattaatgtttgatgatttgaagtggaatagttttttattttataaatatattttttttatttttgttttcgttttggtttatgaaaaaattgttttttgtaatgggagatgggtgtattagaattttataagttattattaaaggatttatcgtgtaattaaatattatttgtttttttaaaatttatgggaataaaaaattttttaaaagagaaatatttgaaatagtaattattgagaattttttaagttaatgttagatattatattattaatataggaagtttttttattttgaatggaagtcggaagaaaaatgtattttatttgtagaggagtagaatatttaatttttttttagaaattatgtaaggaagaagagagtggagtgaaatatttaaaaatattgatttaaaatgttgagagaaatattttatattattaagaatatgagtttagatatttttagggatttagattaagagagtttttgaatgattgagttttatttgttaagatttagatttttagtagggttagatatgtttaataggtgtgattattttatatgtggtcgatggtatagggtattttaattaattagatgttggtagtagttattatttatattttttggttattataattatagtattatgtttttattttttttagttttagaggttgtggagtagtatattgaggattagtgtattgtatgatttttaaagttgtttgtatttaaaataattagatatatttttattgttgagcgaaggttgtttgttttttttttttttttagatagtttggttgttttatataggttggagtgtggagtgtagtggtgttattttagtttatagaggttttgaatttttgggtttaagcgatttttttgttttagtttttagagtagttgggattataggtatttgttattatgtatggttaattaaaaaaaaaaattttttttttttagagatggggttttggtatgttgtttaggttggttttaaatttttggttttaagcgatgtttttgtgatcgtttgttaaatgttgggattataggtatgagttattgttttaggtttgtatttttttttttttttttttgagatagagtttcgttttgttgtttaggttggagtgtagtggagtgatttcggtttatttataagttgttttttaggtttatgttatttttttgttttagttttttgagtagttgggattataggcgtttattattacgtttggttaattttttgtatttttagtagagatggggtttcgttgtgttagttaggatggttttaattttttgatttcgtgattcgttcgtttttgttttttaaagtgttgggattataggcgtgagttacggcgtttagtttcgggtttgtaattttatttgaataaaatgtttgttttttttattaaaaagttttttattttattgggtttttaaatatttaaattgatttgtatttagtgttatatgaaatatataagaaatttattagtttgttagtttttttagtttttttgtttttttttttttttttttttttttttttttttttgaattagttttattttgttttttaggttgtagtgtaatggtgcggtttcggtttattgtaatttttgttttttgggtaagtgatttttttgtttttgttttttaagtagttgggattataggtttttgttattacgtttagttaatttttgttatttttagtagagatggggttttattatgttggttaggttggttttaaatttttgattttaggtgatttatttatttcggttttttaaagttttgggattataggtgtgagttattgtgtttcgtttttttagtttgtttttttaaggatatagattttagagttagattttggatttatattttataattatagttttgttgttaattagtagttatttttttttagtttttatataattttattttgggtaattatgtaattttttggtgtttttgtaaaatggagatgataatagtatttattttatagtgttgttgtaatgattaaattagtatgaataaagtatttaatatattgttaagagtatagtgtaaatgtatgtaagtataaattattattatatttataaaatgagatattattaattaaattttatataggtaatataaaaatattttaaaattttttttggtggggaattattttttaaaaattaaattattggttgggtacggtggtttatgtttgtaattttagtattttgggaggtagaggagggcggattatttgaggttaggaggtcgagattcgtttagttaatatggtgagatttcgtttttattaaaaatataaaaattagtcgggcgtggttgtgtgtgtttgtaattttagttatttgggaggttgaggtaggagagtcgtttgaatttaggaggtggaggttgtagtgaattaatatcgtattatttaattttagtttgggagatagagtgagatttcgtttaaaaaaaaatatataatataaaaataaaattaaattattttatttggagaagcgttttgttgtggtatttagtttagaattgtattatgaggaatatcggtgaattatttattttttaatttagtattttttgagtgtttgttaggtatatgttgtattttaggaagatagggaatttatatattagtagaggaagcggtaattaagtgaacgaataaagtttaggataattaattggaattagtagaaaggatttgttgtgtgtatgaagtagatgagaggtatgggttggatcgtggtgagttggggagagaggaaataagggttgttagagacggtgttggagttatgttttgtagggtttttaagattttagtaagtagttgggagtatttacggggagtttaagtttttttttaaggaagcgtgaagagaggttttatttaggggaatgtgttggttttatttatatttgttaaagttttttttgtttattgtatagagaatgaattggagacgggtaggtttagtttggtagtagataagtgtaatattttagggttaggttgaggggtggtaatgaggtggaaggaagtgtatgtagttaagtcggattatatatatttattttggtggtagatttgataggtggtgatgatagtttggatgaggaagataatgaggaggtatggatattatttagatttttggttaagtgttattttgatagttgtatatattttttttattattaaattttttttttatttagatatgattttttttaaaattgtaaatgttttagtgtgtgtgttgtttaagtgaatatgaagattgtatattttttaggtattttaaaattttttcgatttagatttttttgtattgtagttaaattgtatagtcgttttaaattttttttttagtaatgggaattttttttgttgatattttgggtatttaattgggagtattttatttgttaattatggttgttgaggattttaaatttattttatttattattagttttttgaaattatattgttgaatattttgtttgttttggggagtgttagagtttgtgaaggtttgtatttgttgagaggtagtttttttttttttgcgatttttgtttttggtttttatgggtgatgaagggttgtgggatgggaggggtagttggagtcgttgagttagttttatttgagttttattgtgtaattttattgttttttttagtatggtttttaggggtaggaagttaggtttatgagattttatttattgttattgggattagtatatttttttagtaagtggaatttattattattttattaaaatatggttttttcgtgtgaatgaagtgagattaagtatataaagtaatttttagttaaaagattgtttaaattgttatatgtggaataaattattttatttttttttaagaaatgaagagaaattgggaaaaaaattcgttagatagtaatgtatagagatttttttatatttaaatgagaagttagaaatttatataaaatataagaattttaaaaatattttttaggtatagattattattaaatatttatggatgttttttattttttattatattaaaatatttaagttaattttatatttagaatatttaaaaatagtttaattttaaaaagaagatataaagtattattagttgtgttttttgtgtataattagcgtgtgtttgtggaggtataaagatttttagtttaatgatagtattatgataaaaagtttagatggtaaaaattggagttttagttggatgatatattttataataatttaaagatggttttagtatagaagttatgttattttagttttttgtaattttttttttatttattaatgggtcgtgaaggtattgataaaagagttttttagaaatgtttttatttgtttttttttttataga

SEQ ID NO: 2098 - DNA, 73334 bp, Artificial Sequence
  chemically treated genomic DNA (Homo sapiens)
tttgtaagaaagggaataaatagaagtatttttaaaaggtttttttattagtgtttttacgatttattgatgggtgaaggagggattataaagaattaaaatagtatggtttttatgttggagttatttttgaattgttataaaatatgttatttagttggagttttaatttttattatttgaattttttattatgatattattattaggttagaagtttttatatttttataggtatacgttaattatgtataaaaagtatagttgataatattttatattttttttttaagattgagttatttttaaatgttttgaatatgaagttgatttgagtattttaatgtaatagaaaataaaaaatatttatgagtgtttaataatagtttgtgtttaagaaatgtttttgaagtttttatgttttatatgaatttttggttttttatttaggtgtaaaaaaatttttatgtattattgtttaacgaattttttttttagtttttttttattttttagaaaaaagtaaaataatttattttatatgtaataatttaagtaattttttaattaaagattgttttatatgtttgattttattttatttatacgaagaaattatattttagtaaaataataataaattttatttattgaggaggtatattagttttagtgatagtagataaaattttataagtttgattttttatttttgaaggttatgttaaaaagaataatggagttatatagtgagatttaggtggagttggtttagcggttttagttgttttttttattttataattttttattatttatggaagttagaagtaggaatcgtagaggagggaaggttgttttttaataggtgtaggtttttataggttttgatattttttagggtaggtaggatatttagtaatgtaattttaaaagattagtggtaaataaagtgagtttaaaatttttaataattataattaataggtaaaatgtttttaattaaatatttaagatattaataaaggaggtttttattattaaagaagaaatttgaaacgattgtataatttggttgtagtgtaaaaaaatttagatcgggaaagttttaaaatatttaaaaaatgtgtagtttttatgtttatttgggtagtatatatattagaatatttatagttttgagaaggattatgtttaaatgaaaagaaagtttaataatagagggaatatatgtaattgttaaaatggtatttagttaaaaatttagataatgtttatgtttttttattgttttttttatttaagttattattattatttgttaagtttattattaaaataaatgtgtgtgattcgatttgattgtatgtatttttttttattttattgttattttttagtttagttttggagtgttgtatttgtttattgttaggttgggtttgttcgtttttaatttattttttatgtagtagatagaaaaaattttagtaaatgtaaatgagattagtatatttttttgggtaaaatttttttttacgtttttttgaaaagaaatttaaatttttcgtagatatttttagttgtttgttggagttttgaagattttgtaaaatatggttttagtatcgtttttgatagtttttattttttttttttttagtttattacggtttagtttatgttttttatttgttttatgtatataataaattttttttgttgattttagttaattattttgggttttattcgtttatttagttatcgttttttttattggtgtgtaaattttttgtttttttagaatgtagtatatgtttggtaaatatttaaaaaatattgaattaaggaatgaataatttatcggtattttttatagtatagttttaagttaaatgttatagtaaaacgtttttttagatgaagtaatttaattttatttttatgttatgtatttttttttagacgaagttttattttattttttaggttggagttaagtggtgcgatgttggtttattgtaatttttattttttgggtttaagcgatttttttgttttagttttttaaatagttgggattataggtatatataattacgttcggttaatttttgtatttttagtagagacggggttttattatgttggttaggcgggtttcgattttttgattttaagtgattcgtttttttttgttttttaaagtgttgggattataggtatgagttatcgtgtttagttagtaatttaatttttaaaaggtaattttttattaaaaaaaattttaaggtatttttatgttgtttgtgtgaaatttaattagtaatattttattttataaatataataatagtttatatttgtatatatttatattatgtttttggtaatatattaaatattttatttatattaatttaattattatagtaatattatgaaatgggtattattattatttttattttatagaggtattaagagattatataattgtttaaagtaagattatgtaaaaattgaaaggaagtaattgttagttaatagtagagttatgattgtggaatatgaatttagggtttggttttaaagtttgtgtttttaaagaaataaattgaagaggcggggtatagtggtttatatttgtaattttagaattttgggaggtcgaggtggatagattatttgaggttaggagtttgagattagtttggttaatatggtgaaattttatttttattgaaaataataaaaattagttgggcgtagtggtaggagtttgtaattttagttatttgggaggtagaggtaggagaattatttgtttaggaggtagaggttgtagtgagtcgagatcgtattattgtattgtagtttgggagataaagtgagattgatttaaaaaaaaaaaaaaaaaaaagaaaaaaaaaagaaataaagaaattgaagaaattaataaattgatgaattttttatatattttatatggtattagatgtagattagtttagatatttgggaatttagtaaaatgaagaattttttgataaaagagataaatattttatttaaataaaattgtaggttcggggttgggcgtcgtggtttacgtttgtaattttagtattttgggaggtagagacgggcggattacgaggttaggagattgagattattttggttaatatagcgaaattttatttttattaaaaatataaaaaattagttaggcgtggtggtgggcgtttatagttttagttatttaggaggttgaggtaggagaatggtatgaatttgggagatagtttgtaagtgagtcgagattattttattgtattttagtttgggtaatagagcgagattttgttttaaaaaaaaaaaaaaaaaaatgtaggtttggaatagtggtttatgtttgtaattttagtatttggtaggcggttataggagtatcgtttgaggttaggagtttgagattagtttgggtaatatattaagattttatttttaaaaaaaaaaaatttttttttttaattagttatgtataatagtagatgtttatagttttagttattttagaggttgaagtaggaggatcgtttggatttaggagtttaaggtttttgtgagttaggatagtattattgtattttatattttagtttgtgtgagatagttagattgtttaaaaaagaaaaaaaggtaaataattttcgtttagtaatagaaatgtatttgattgttttaaatgtaaatagttttaggaattatgtagtgtattgatttttaatatgttgttttataatttttggggttgggaggggtgaaaatatggtgttgtagttgtgatgattagggagtgtgggtgatggttgttgttagtatttggttaattaaagtattttgtgttatcggttatatgtgggatgattatatttgttgggtatatttgattttgttgggaatttgagttttgataggtagaatttagttatttaaaggtttttttaatttagatttttagaggtatttgagtttatgtttttaataatgtaaggtgttttttttaatattttaaattaatatttttaaatattttattttattttttttttttttatatggtttttgaggagaagttgaatgttttgtttttttataggtaaagtgtatttttttttcggtttttatttaaaataagaaagttttttgtattagtggtatggtgtttgatattaatttggaaaatttttagtaattattgttttagatattttttttttaaaaaattttttatttttataggttttgggggaataggtggtatttggttatacggtaagttttttagtggtgatttgtgagattttggtgtatttattttttattgtagaagataatttttttatggattagggcgggggtagggatgggggggatgtgtttgtgggatgagaaattgttttattttagattattaggtattagttatatttttatatggagcgtgtaatttagattttttgtatgtgtagtttataagaggatttatgtttttatgagaatttaatgtcgttattgatttgatagggagcggagtttaattagtgatgtttattggtttattatttattttttgttgtatggtttggtttttaataggttacggattggtatcggtttgtggttcggggtttggggaattttgttttagaggaaaggaagatgtgttattgggaaggtgtgtaagaatggtattaagatgttggtaatattttattttttgatttgtgtggtaatgattatttatttatattttaataatttattaaagtataaatcgtatttatatgttttttaatatgttattttttataattaaaaaatagtttttaaaatttttataggttggtaagatggtcgaataggaatagttttggtttgtagtttttaataggattaatgtagaaggtaggtgatttttgtatttttaattgaggtattcggtttattttattgggattggttagatagtgggagtagtttacggagggtgagtagaagttaggtggggtgttattttatttaagaagtataatggattggggaatttttttttttaattaagggaagtcgtgagggattgtgtcgtgaggaatggtgtattttagtatagatattacgttttttttatggttttcgtaatttatagattagaagatttttttgggtgtttatattattagggttttgggttttaagtataaaattgggcggttatttgggtagatatcgagttagttgtaggagtttttttatatattagtggtatttggaatattagcgagatagaatcgtttattttttttaaaagggggttgaagttagggagttaagtggtttagtttagtggattttatttttaaggagtttagtaagttaagatttattggtttgaaattttggttgttagtatagtagtttgaagttaatttgggatgtttgagtttggtggggggaggggcgttttttattattgaggtttgagaaggcggtttttttttgatagcgtaaataaagtcgtagggatgttcgtttagtaaagtcgttgtagttagattgtttttttagattttttttttttgggttgggtatttttgaaagaaaggtagtagttttagttagtagtttatagattaaatttttatttttttgagatagagtatttgggggaaggggtggttgtgggcgtagttatagtagaattaaacgttttcgtttgttggttttgaagagagtagtagattttttagtatagtatttgaattttgttaagggaaagattgtttttttaagtgggtttttgattcgtatgttttttgataaggagatatttttaagtaggggtcgatagatattttatataggagagtttcggttggtaattggcgggtgtttttttgagacgaagtttttagaggaaggattaggtagtaatatttgttgttttgaaatttttattggtgatatttaggtaaatagcgtttggagtggatttttagtaaattttagtagaggggtttgattgttagaaggaaaattaataaatagaaaggaatagtattaatattaataaaaaggacgtttatataaaaattttattcgaaggttattaatattaaagattaaaggtagataaatttatgaagatgagtaaaaattagtataaaaaggttgaaaattttaaaaattagaatgtttttttttttgtaaaggattataatttttttttagtaagggaataaaattggacggataattagtttgataaattgatagaagtaggttttagaaggtgggtaataataaatttttttaagttaaaggagtattttttaatttaatgtaaggaagttaagaattttgaaaaaaggttagaggaattgttaattagaataatataaatgatttgattgagttgaaaaatacgttatgagaatttcgtgaagtatatataagtattaatagttgaatcgattaagtagaagaaaggatattagagattaaagattagtttaatgatataaagtatgaagagaaggttagagaaaaaaaaaatgaaaaggaataaattaagtttttaagaaattcgggattatgtgaaaagataaaatttacgtttaattggtgtgtggtgtatttgaaagtgataaggagaatggaattaagttggaaaatattttttagggtattatttaggagaatttttttaatttattaagataggttaatatttaaatttaggaaatatagagaatgttataaagatatttttcgagaagagtaattttaagatatgtaattgttagatttattaaagttgaaatgaaggaaaaaatgttaagggtagttagagagaaaggtcgggttatttataaagggaagtttattagattaatagcggatttttttgtagaaattttataagttagaagaaagtggaggttaatatttaatatttttaaagaatttttaatttagaattttatatttagttaaattaagttttataagcgaaggagaaataaaattttttgtagataggtaaatgttgagagattttgttattattaggtttgttttataagagtttttgaaggaagtattaaatatggaaaggaaaatttagtattagttatcgtaaaaaaatattaaattgtaaagattatcgattttgtgaagaaattttattaattaatgggtaaaataattagttagtattataatgataggattaaatttatatataaaaatattaatcgtaaatgtaaacgggttaaatgttttaattaaaggatataaatttgtaaatttaataaaaagttaagatttattagtgtgttgtaaggagatttattttacgtgtaaagatagatataggtttaaaataaatggatggaggaatatttattaagtaaatggaaagaaaaaaaaaagtaggggttgtaatgttagtttttgatgaaatagattttaaattaataaagattaaaaaagataaagaagggtattatataatggtaaagggatgaatataataagaagagtttattattttaaatatatatgtatttaatataggagtatttagatttataaagtaagtttttagaggtttataaagagatttagattttcgtataataatagtgggatattttaatattttattgttatatgagatagattaacgagatagaaaattaataaggatatttaggatttgaatttagttttggattaagtggatttaatagatatttatagaattttttattttaaattaatagaatatatattttttttagaattatattatatttttgttaaaattgattatataattggaagtaaaatattttttagtaaatgtaaaagaacggaaattataatagttttttagattatagtgtaattaaattagaatttaggattaagaaatttatttaaaattgtataattatatggaaattgaataatttgtttttgaatgattattgggtaaataatgaaatgaaggtagaaataaagaagttatttgaaattaatgagaataaagatataacgtattagaatttttgggatatagcgaaaatagtatttagagggaaatttatagtattaaatgtttataagagaaagtaggaaagatttaaattgatattttaatattataattaaaagaattagagaagtaagagtaaatatatttaaaagttagtagaaaataagaaataattaagattagagtagaattgaaggagatagagatataaaaaattttttaaaaaaattaatgaatttaggagttggtttttggaaaagattaataaaatagatagatcgttagttagattaataaagaagaaaagagagaagaattaaatagatataataaaaaatgataaagaatattattattgattttatagaaatataagttattattagagaatattataaatatttttatataaataaattagaaaatttagaagaaatggataaatttttggatatatatatttttttatatttttttaagattaaattaggaagaagttgaatttttgaatagattaataataagttttgaaattgaggtagtaattaatagtttattaattaaaaaaagtttaggattagatagatttatagtcgaattttattagaggtataaagagaagttggtattattttttttgaaattattttaaataatagaaaaagagggatttttttttaatttattttatgaggttagtattattttgatattaaaatttggtagagatataataaaaaaagaaaattttaggttaattttttgatgaatattaatgcgaaaatttttaataaagtattggtaagttaaatttagtaatatattaaaaagtttatttattataattaagtcggttttatttttgggatgtaaggttggtttaatatatgttagttaataaatgtaattcgttatataaatagaattaatgataaaaattatatgattattttaatagatgtagaaaaggttttcgataaaatgtaatatttttttatgttaaaaatttttaataaattaggtattgatggaacgtattttaaaataataagagttatttatgataaatttatagtaaatattatattaaatgggtaaaaattggaagtattttttttgaaaattggtataagttaaagatgtttttttttattatttttgtttaatatagtatcggaaattttggttagggtaattaggtaagataaagaaataaagtatatttaaataggaagataggaagttaaattgtttttgtttatagatgatatgattgtatatttagaaaattttattgttttagtttaaaatttttttaagttgataagtagttttagtaaagttttaggatataaaattaatgtgtaaaaattataagtatttttatatattaataatagataaatagagagttaaattatgagtgaatttttatttataattgttataaagagaataaaatatttaggaatataatttataaaggatgtgaaggatttttttaaggagaattataaattattgtttagggaaataagagaggatataaataaatggaaaaatattttatgtttacggataggaagaatagatattatgaaaatggttatattgtttaaagtaatttatagatttagtgttatttttattaagttattattgattttttttatagaattagaaaaaattattttgaattttatatggaattaaaaaaaagtttatatagttaagataattttaagtaaaaagaataaaggtggagatatcgtattatttgattttaaattatatattataaggttataggaattaaaatagtatggtattggtattaaaatagagatataggttaatggaatagaatagaggttttagaaataacgttatttatttataattatttgatttttgataaatttgataaaaataagtaatgggaaaaggattttttatttaataaattgtgttgggaaaattgttagttatatgtagaaaattgaattaggattttttttttatattttatataaaaattaatttaagatgtattaaagatttaaatgtaagatttaaaattataaaaattttggaagaaaatttaggtagtattatttaggatataggtatggataaagattttatgattaaaatattaaaagtaatggtaataaaagttaaaattgataaatgggatttaattaaattaaagaatttttgtatagtaaaagaaattattattagagtgaacgggtaatttatagaatgggagaaaatttttgtaatttatttatttgataaagggttaatatttagaatttataaggaatttaaaataaatttacgagaaaaaaataattttattaaaaagtgggtaaaggataagaatagatattttttaaaagaagatatttatgtagttaataaatatatgaaaataagtttattattattggttattagagaaatgtaaattaaaattataatgagatattattttacgttagttagaattggcgattattaaaaagttaggaaataatagatgtcgaagaggatgtggagaaataggaacgtttttattttgttggtgggagtgtaaattattttaattattgtggaagatagtgtggagattttttaaggatttagaattagaaatattatttgatttagtaattttattattgggtatataaggattataaattattttgttatataaagatatatgtatatatgtatgtttattgtagtattatttataatagtaaagatttggaattaatttaaatgtttataaatgatagattggataaagaaaatgtggtatatatatattatggaatgttatgtagttataaaaaaggttaagtttatgttttttgtagggacgtggatgaagtcggaagtcgttatttttagtaattaatataggaatagaaaattaaatattatatgtttttatttataagtgggagtcgaataatgcgaatatatggatttagggaggggaatattatatatcggggtttgttagggggttgggggattaggaaagggatattattagtagaaatatttaatgtagatgataggttgatgggtgtaggaaattattatggtacgtgtatatttggttaataaatttgtatattttgtatatgtattttagaatttaaaatataaaaaaaaaaaaaaaatttttagatatatatttattataaagatattattttataggtaaagaaaaaaggaaaaagtattatagtttataaatgtgaataaagatggatagtatttgatgaatataataaaattttgtaaattgttgaaatagtatgtattttttgtttgtttgtttttttaattgagttttttgtttggaaatattaaaattatttattaggatgggtagagataatagttttagtatttgttttttttttttttttttagtttttaaataatgattttatttttttagttttggttttaaggaggggaaaatttaaaatttgttgtttggattttttattttatttgtacggttattgttttgttttagagggttttgttataaagagggagagacgtttaatttattatttacggaggaataagatagtgttattcgaagtagatatataaggtggttttcgtgtagttttaaaaaatgtatgttttgaaaaatggggttgattttttagatttatggtaattttaattttttttatagatgtattatttttttatcgtaggtaatttataaatttattagataattgatagttgattatattttttgtttaatattaaaattttttattttgttttaaatgtaagtttttgatttttttatgattttgtttagtgtatgtatttaaatttattttattattagtttttagagaaatattgtttagtatttttaagaaataaaaaaggtaaatgttttataatatattttttgaaaatttaggatgttaataagtattttgtgtatatacgtatagtatatattaatgtagtaaaagtaattggtatgaaaaattagaaggaaatttattttttttattttttgtataatgtattttttagtgtatttatttagtttttaaggaattaaaataaattatgattttattttttttacgtatgtagattaaaaataatagaagttgttagattttttagtaagtatttttaggagaaaataaagaaattaaataaagatttttagaaatttttatgtagaggggattaaagtaaagtcgtatgagtagagagatgtagacgttggaatagaaggtagtgtttagtgaaggatttatatatgtttgattttgtttttgttttttgttaggtgggagcggattttttagaagtaggaagaggtgaggggttgggataaagtattaagggaaattagttatggggttatgtaaatatttaagatattgaaaaggaattagtttataatggtattagtttaggattattgttattgtttttttttttatatatataaattgtttaagagtttggttgtttgttaagtattattttatgaatttaaatagttatgatataaagatatattattgtttataggggtttatggtttgagttatcgagataatatggtttagatttaaagtatagtaggtaataaagagtattattttaggattaaaggttttttattttggtgaattttattttttaggagaaggatatatttaaaaattttatggaaaatgtattttataagaatatggagtttattaagtataatttatgagagtagaaggaagtaaaagtattaaaatatttgagtagtgtttgaagaaagataataaagagggaggagacgttgggtgataggttggggtaatgtattttaatttattaaaaataaatagaaaattatttttttttatttagaacggttattattaagaaaataacgataagtgttgatgaggatatagagaaattagaattttcgtgtattgttggtaggaatgtaaaatggcgtagttgttacgaaaaatagtatggtggtttttgaaaaaattaaatatagaattattattgatttagtaattttatttttaggtatatatttaaaagaattaaaagtagggttttaaagagatatttgtatatttaattttatagtagcgtaatagttaaaagtgagaataatttaaatatttattagtggagaaaaggatatacgaagtgtggtatatgtatatattggaatattatttagttttaaaaaggaatgtaattttgatatatataggaataaattttgaaaatattatgttaagtgaaattagataaaatgcggaaggatagatattttttgattttatatagatgaggtatttataatagttaaatttatagaggtaaattaatttatgaggggagatagtaatggaatgttattgtttaatgggtagagtttttgtttgggataacgggaaagttttggggatggatggcggtaatggttaaataatgttaatgtaattaatgttattgaattatatgtaaaagtggttaagatggttataattttatttatatttattataattaaaaaattaataatatataaatgataaatttatagtggttttagttttggttggtttagtagaggtggggtttggagaatatgttgtatttttgttttgttgtttttttagggtttttttagaatagggttgtatatattgttagttgtttatttagtagttttaagttttttattttttttttgttaagagttttgtttaggaattttaaggttatatgttttagggagattgggatattcgttagtgttaggggtgaattttgatttatatagagtaggtaattttaaatgttttgtttttagggtttatttatattttttaatgttattgaagattttaaagagttttatttatatatatatgtgtgtgtgtgtgtatgtatgtgtatatatatatatatttatatatatatagatatagatagatagatagatagatagatatttattattagaaattaaaattgagaataattaaaaagataaaatatataaatatatattttattagttgttagagagaggttattattatttattatgtaattttttgataacgttatcgtatattagtgagcgaatgcgagtcgaaaaggtaaatagtagtttagtattattataaaaatagttttatttttgtgaattttttaaaagggtttcggggattttgggtttttagttatattttgggaatggttagtatagattagttatggtatttatttttgttcgtttattaaattgtaggaataggtatattatggaaatatagggtatgagaattgaattttaataaaaggttttttagttttttttagttttaaatgagtttatttttttttatatttgatatagtagtttttgtgtgatatttagaacggtaatagttattttgagatttagggataaggaaatttgaggggattggttaatatattgtaaatagtaaagaagaattatagtttcgtgtttttatagtatagttgaggtaatgaaggagttaaatgtggaattgttttttttgtttaattttttaatattattttttggtttttttgttatttgtaattaaatatattttagttgatatattttaggatttagtttgttgagtatattttgaaatttataaatttatataatatttggtatattgtaggagtatgataaatatgtattgaataaatgtatggaaaataaatatataaaaaaagtaataaggttgttgtagaagaaaaataaaatagataaaattttgattgattttatgttgatagaaatttttgtagttttaagattgttaatatttaaaataaagtttattttaaattatataaaagtagttatatatggtatttgttagggggataagaaagtttaagaatgtttttttttggtttaaaatatttttaagtttagagagttaagtttatttatgttaaatatggattatataagttttttaaagtggaggcgatttgataaagtgtattttttttttatttatttttagtatgaggtttttttttttatgaaataagtattaaataggagatgtatggagagaatgttataaaatatattaattatggaaaaagaaaaaaaagataaattaaatatttagtttttaattaattaatgttattaattaggggtattatgattttgttagaaaatatttaaaattttttaaaatataattaaatataaaattaagaaatttatgtttaattttatttaagttgataagatttttttttttttttgatgaaagtttgataattatttttaatttgttgaaatgtaatgtttttttgttttattttatagggtaagattggttaatttatttttgtgtttgtggttttttttttttttttgaaagttataataaaagatttttgtttttattaagtgtttatgaaagaaataaatggtatttttttttttaaaattaatgaggttttaagaaaagttttattaggaggagttggttatttttttgttgagttagtggcgttttatttttgagatagtttaattaaaaatatagatttgaaatttgtagataattttaaataaattttaattgtaaataaaatttgggtttaaggaattggaggaggtaattttaatttaggtgtagagtatgtatatatattttttagatgattttgtaaagaattaaggaaattgaatttagtagataattttggggatttattaggtttaatttttttatttaagattttagtaatggggggagaggagttattttttggatttggttttaaaataaaagtatttttttattatagcgtttgttatcgaggttgttaagatagaaatttttgattttgttttttattagagtattaaggagttattattcggatttgaaaaatattagtttttttttatgtattttattataattattattttttttttttgcgttttttgtttttattttatttatttgatagtaagatttgggttttggttagattagttagaaagtgagttgaggaatatattagttattaaaatattaggaagtttttttttgttttgtgatttggttttaagttatttttgtttttttttttttttgattttataggtaatttattattatttaaataaaaataaggaaatttatatatttattaggagtttattttatgataagagttttgaaaattattgtaaataaaaagatgatagtgttttttatttttaagtaatttatggttaatgaggaaattgggatttatatatagattatattgtgggaagggttgggagagaaggaaatatagggggttgtaggtagtatgaggaaggggtattagttcggtatggaggtgttagagtttttagagagaaacgattttgagttaagtaggttaggaagtatgagtaggagtgagttaaagatattaaaattaaatgtaaggtgtttgttgtaattaatagtaagagttaaattattatttgatttatggtttttaaatttaaaaattgttgagagtttttagtattatttaaagttattttttttattagttaaatattaataaatataaattagtaaaatttttatgtttgtaatttttatataattataatataaaaaatatataaattaaatattaataaatttataaaatgagtaaaatttaaattgataaaattaatttagcgtgattaatgatgtagttattgaaatttattttggattaattatgtagggtttggtatcgataggtaggttttgttgattggttaatattaatatatgtagggagatagtttaatttacgtattatttttttttttagaattattgtgtaacggtaattttttagtttaaatacgttatttatatttttatttttgtttttttataatatttttttatatttaaagtagtgttttttggtattaatataaatataattttaggtattgaaattttaagatattatttagttagaattgtaggtatttaggtgtgtggaattatgaatttttaaaaaattattattaaaatgaaaaatagaaggtgaaatttttgtagagaattatagtattttaataaattttatttgtttaattttatttattttttggggtttgtaagttttagacggagtttaagtaattatatgttatgggttattgagtttatataggaagcgtttttgtggttagtttttagtattatgtaaaattaagtattttttttttttttaaattttttgtttatgtgatttttagttaagatggtacggtaaatttatttttggatggattttttttattttaaatatatagtaatgagaggggaaatataaaaagaaaaaaggaaaaggatataggtaagtatatatataaaataaatatttttatgaaatcgatacgagatagaaatataaagaggtaagatttcgaggataaaattatgagtagttagttttttttatgttagggtttaaaaataggtaatgaaattgtaggtttgggttttagaagggttgggggttaaatagaggtataaacgatagagtgagaaattagtatttttgttggaaggtgggatggaaggtgttgattagagttttatttttttatgtttgaaggaaggttcgtagtatttttgttttttatggagtggcggtttagggaggatggaggatatttgttaggtaggattaggtattgcgtgaagtagttatgaatgtttaggtaattaagtttttattgtgaaagttagttttgtatttaggttttatggaagttagatagagataagtagaatgaggttatataggggagagtgtgtagagagggagaaagaggcgaaaaatgattgaatgagtgaaaagtttttaaaattttatttaaaatatgttatttaattaaagttttaaagtatatgaagaaataaatgtaattaataatattagatattagattataaatttattttagatgaagttaattagtttaataaataggtatatttagatgttaaaaaattttaataaagtatatttaagatattaaaataattttaataaaatatatttaaggtgatttttaaaattaataaaaattagtatatttagggtgttttttaaaaaagttaattaaaaaataagaaagtataaattgaaaaggtagaattaaaagatggttaaaaaaaaattaattgtaaagtatgtaaattaggattacggttattaaaatttaaaaatttagtgtataagatattagatagtagattggagaggaagtattttgttttgataaaatatattgtatattattggatttgtagtagtatagtttaggagtttagttgttggttttatagtttggttttattcggatttggttggtagtttttcgatattataggtgattgaatgggttagattagtatatttaggttgtgagttttattagtattttgttttttttttattagttggtggatataggtgaagtaattttcgttttatataatttttatagaaatttgatgaaaaagtagattttgaaatgttttaggtaatagatttgttttttttgtaatagataatttattttggatttaaatttattttttttgtttattatatttttttagtattattaaatgtggatttgattggattttttatttattattatggtattataattaatttcggattaaggaatttattatatagtaaaaggagtaaagtaatgggtttttgttaaaagggtttgttgttagttaagttattattagttgttgtatgaattcgatggtttttatttgtatttttttattatttttaaatttttttattatatatttatttttttttgttgtattttttttgaagtttaaataggaaataaatattaatataaaggaaaatataaataagaatgatattttgagttatgtggaaaggaattttgatttgaggaattatagatgaataataatataaaaaattttggaaaattggtaataatatatatcgtaattgtttggataaatagttatattttttttttttttaaaaggttagaaaattttttatttaggtttttttggaaagtagagtttagataggttagagaaggtaaagattttaatttatttttttatttttaaagatagaaagttttttattagattagttatgtgatgttttttaggtgtgtgtttggtagttatgaaaggggattgataggatataggttttggaattagtcgttgtgtttttagaatttttttaaagtcgatgttatgttatagtataagagtattatttattgagttttaagggataatttagtttatttattgaaaaatggtttagtaaaatatgattgtggagggatgaattttatattattttaatttagttggttgtgttttttttttttaaaattagaatttttgttaagatttttgaaaaagaagtagtatgtttttttatttttttatttttattttaattattatagtaaaatgaatgtttttttttattaagttttggttattttaatgaatattgttatttttagatttttttttttttatttgttttttaaagggtagagaaaatttttaggggagtagtagttttaaagggtttgggaaggatgtatgtaaagttagttattcggttaaattttaaattttatgaggtatagtgttgtgatgggggaattgtttttataaattcgttgaaagatgattataatagtttttttttttttgaggagtttaagatgagtatagaggttttaaattagtaaagttggagattagatgatttattaataaaattgaatatagaagaaaatacgtaggtgtaaggaaagatgatttatgggataagtaatattggggagagttgattgtttttgttgtgttgtgtattaaatatatagaatataattgaaggtaaagagcgggttttttttggagttttttatgttttatatgaagtttttaggtattgtttagtatagtttaagtgatatagatttattcgaataatttatatatattttagtttggttattacgtagttttgttatgttttattggtttgagagggatattttgggaattattattgtaggggtgggttgtttttatatatttgtgggtgtttttcgtaaggtgggacgagagatttggaaaagaaaaagatatagagataaagtatagagaaagaaataaggggattcggggaattagcgtttagtatatggaggatttcgttagtttttgagtttttttagtatttattgattatttgtttttaagtatttgtttaataaagtatattttgtatcgtttttaatttattttattttgagttgatatagtatatgttttagagagtacggggttgggggtaaggttatagattaatagaattttaaggtagaagaattttttttagtatataataaaatggagttttttatgtttatttttttttatatagatatagtaataatttgatttttttcgtttttttttataattatatgttagttttttttatgttttagttatgattaaaaagttgtagtttttgtttatgttaatatttgtattagtattagtttttttatttagtatcggttagggattcgtcgtagcgagagtatttgtaggttaatacgagaggggagtttgtataaagtaattattcggagaaacggtaagtattttagagattagttattcgagaattgtgagagtgtatatttattattttggaaattataaaaattttaaaatagtaaatgtgtttatattttgttttaattattttatagaaaaataagatattttagaaaaattttaattttgattttttagtgtataaattgttgtgttaaatgtgtagtttatattttattaatgtcgtatggtaaggtaaggagtaggtagtagtcgtagggaggataaatttaattgagtatgaaaatttttagaaagggatttgttgaaaaagaatgaggtgatatatggataaattttaagataaagggtaatttaggtatttaatatatttaatataggtaaagtagaaaaaatttaatttggggatttagaggtttattggatttttttaaaatataatattgagatttagttgattaatataaaatgttataatgttagaatatattaataggggtttagtaaaaattttataattttgttcgatttggtttatttgtggattttattagaatgttaggtgtagtggagaggagtagttatttttttagtatttattttttattttttttttttttaacgagattggaaattttttagttagtatatttgagtgggataagaatgggttttgattaggttaaagtagtgtttattaattaaggatagtcgtgttttagaggggatttttgataatgtttgaagatatttttggttgttatagttgggagaaggatgttattggtatttagtgggtagaggttaggtatatcgttgaatatttattaagtataggatagttttttataataaagaattagtagtttaaatgtcggtattttatttttatattagtatatgggatttgtgaatattattttatatggtaaaggaatgattattattttgtataataataattattataaagtggtaatatttaggattttgagagaaggagtttgttttggaatattagggtagggtaggttatatgtaattttatgatagaggtagagtaagttggagatagatatagaggaggtagtaaagtgaagatagaagtaaagattggagggatgcggttataagtttaggaatgttatgttggtcgttagaagtgagaggaaggtgtttttagagggaatgtggttatgttagtttttatatttttggtttttagaattgtaataagatatgattttgtttttttgatttaataagtttgtagtaatttgttataatagtttcgggaaattaatatcgtattttgtaaggaggtgtatgaattgtaaattataaaaagggaagtaaagttatattttgtttttttttttgatttgaagatttttttttattaatatattaaaggtttttatattaggagttttttttattgttaaaatttttaatgaaaaatattattaagtatttttgttgttgaatgtacgttttaaaagtttattatttgatttattaattattttttaaagtatggtttttttttttttttattaattttattaagttttttttttttttttttttttttttttttttttgagatggagtttcgttttgtcgtttaggttggagtgtagtggcgcgattttggtttattgtaagtttaatttttcgggtttacgttatttttttgttttagttttttaagtagttgggattataggtattcgttattacgtttggttaaatttttttgtatttttagtagagatagggttttattatgttagttaggatggtttcgattttttgatttcgtgattcgtttgttttggttttttaaagttttgggattatagttataagttatcgcgttcggtttcgtttttttttttttattgaggtaataaagtattattttaatatattttatgtattaattatatttatttaattttggattatttattaataaaaagtttttattgtttaatgatatatttttttatttgtagaaagtatttggatattttaggttgggatggaatatattataatttttattattaaaatgaatataagttagtcggttgtagttgagaggttaagcgggtggattatttgaggttaggaattcgagtttagtttggttaatatagtgaaattttgttattattaaaaatagaaaaaattagttgggcgtggtgttatatgtttgtaattttagttattcgggaggttgtggcgagaattgtttgaattcgagacgtggaggttgtagtgagttgggagattacgttattgttttttaatttgggtaatagagtaagattttgttttaaaaaataaaattaaaataataataaaaaaattaatagaagtaattttttattttttagttttttatttattggtaggatttttagaattaatattattaagtgagggataggtatatttattttatttatagtaaatgtttgtgaagtagtttgatttttttatattttttatttatattttgttttgtgggagttattagttagaaatcggtgattagtataattttttattgttcggtaaaggtgtgggggtaggggtatagagagatgaagaattttatagagattatttatttcgttagaattttaataagaatagaatttatattttttggtatttagattaatattttatttgaggttatatgaaggaattaaggataaatgtgattaataaagaagtagaaaatagtagaatgttttttttttttgagaaaagatgaaatgacgtaggtattttttagtttcgacgagggaagggtggtgaacgagttattaaatgtttatcggtgaggaagatattgattgattgaagggtattttaatatgtagttattttgtattgattattaattttggttttttatttttttgtgtgttttataatttaaagagtttttaggattttaattatataagattttattgtattagattttgttggtattgtattttagttttagaatagaaatttatttaattagtataagttaaatgggggaagaggtgttatgaaaaggttatgattaaagattttatgaataatatttaaggaaagaaaaggtttagttggtttaaataggaagtggaattagaagtttttgttatattttagggtgtttatatttttgtttcgtttaagtatatttttttgtatattagttgtttttgttgtttttgttgtttgtggttttttttgtttttttagtttgtacgttttttatgttgtagtttagaaggtggttataattttatacgaaattttagtttaagaattaattattatttaattagtttagtattttaaggtttttatttttagggaagaggatgtgattggtttaatttagttaatagattttttagatagttttttacggggttagttgtttattttataaagattggtggttgatgagtattattgtttgggtagatattttaaaatagggtgtagtaaagaggaaatgattggtatatgtatagaggaatttaagagtgatatagtttttttagttaaggttatttagaaagattgtattattttagaatttgtgatttttggatgaagtggttataatttgtaaatagagagtaggaattattttttaatttttttattatattttaagttttgagatatatgtgtagaacgtgtagatttgttatataggtatatatacgttatggtggtttgttgtatcgattaattcgttatttacgttaggtattttttttaatgatgtttttttttaaattttttattttttgatagattttggtgtgtgatgtttttttttttgtgtttatgtgtttttattgtttaatttttatttacgagtgagaatatgtggtgtttggttttttgtttttgtattagtttgttgagaatgatcgtttttagttttatttatgtttttgtaaaggatatgaatttatttttttttatggttatatagtattttatggtgtatatgtgttatattttttttatttagtttattattggatgggtatttgggttggttttaagtttttgttattgtgaatagtgttgtaataaatatatatttgtatgtgtttttatagtagaatgatttataattttttgggtatatatttagtaatgggattgttgggttaaatggtatttttggttttagattttttaggaatttttatattgttttttataatggttgaattaatttatatttttattaatagtgtaaaagtaaggaattatttttaaattttattttagttttagtgtttagaataaaattttattattttgggtttgtattgttagaaatttattatttgtttagaagtgtttttaaattagtagattattaaggaaattttaaaaaatgaaatggattgatatatagtatgggtattgatttgttattatttggggaagggaaaggaggaaagggataaggggaggatatttgtagtttttatataggtaggaattttttgaattatgtatgatataagtttagtataggattggaattagaattagttttttaagtaatttttaaaaataaaaataggttaggcgtggtggtttatgtttgtaattttagtattttgggattgtaaaggttgaggtaggaggattgtttgaatttaggagtttgatattagtttaggtaatatattaagattttgtttttataaaaaaaaaaaaaaaagaaaaataaattagttaggtatggttgtgtgtatttgtatttttagatatttaggaggttgtggtaggaggattatttgagtttaggaggtagatgttgtagtgagttatgattgtgttattatatttttgtttggataatagagtaagaatttattttaaaaaaataaataaataaaaaataaaataaaataaaaatagaaattttattcgggtaggggagagggaagagtgaataggtagaatacggaggatttgtagggttataaaattattttgtatgatattataatagcggatatatgtatatttgtttaaatttatagaatgtataatattaagagtaaattttaatgttaattatggattttaggtgataatgatgtattaatgtatgtttattaattttaataaatgtattattttggtgggggatgttgatagtagggggatgttatgtatgtgggggtatggggtatagaggaaatttttgtattttttgtttaattttgttgtgaatttaaaattgttttaaaaaatagtttattaaaattaacgataattataaattttggtggtaggaataggaggaagtgtagttaaatagaatttaaatttagttaggtggtgtatgtttgtaattttagttgtttaggaggttaaggtagaaggatggtttgagtttaggagtttaaatttagtttgggtaattttataagattttagtttttaaaaagaaaaaaaagaatgtaaatttattttatatattttgagtataaggattataaatagtaggagtagagagagaaggtaagagtggattttagttatatttggtaggagttataggatttatattttgtttaataaaattaattagttttttttgaattataattttattaaaattagatagttagatgtttggtttttttagatagtgagaaaagtttttgttttttgtattatgaggtattatttgtttttaagtttagtgtttgaattttttaattattaggaaattaaatataaaagttttttttgggtttttttttaatttaattattaggatgaatgaatttttaacgttaattaatagttttatatgggagattgttttttatatttaagatatgaagttttttagttgttgaatttgtttttaaatatgtttttattttgatttagtttgtagaatattttaatagtatttttggttttttgtattaatttaatgggttagtttttttttaatttttttttttaaataatagataatttttttttggttatagggagtttggtttttttttgttttttgtttattatatttttaagattatttatttaggggtagggtaattttaagtaatagtatgattatttttatgtatatttaatttaaggttttataaggtgttattatttattttttgttatattttaagaattatatttggtttggtaatatttagaaggttttattatattgatttgagtaggattttaagaacgataataataaaaattaaagaaagagtatgagtatttttgtttattaattgtggttaaagatttgaaatattttttacgagtttaaaaagtataattatcggtttattaattagtataaagttatagttagataggaggaaagagtttttgtattttattgtatagtaggttgattatagttaatttttttttcgtttgtttagagaatattcgtttatagtatatgaggttgtagcgtttattttgagataattttgttcgtttttattattattttcgtaagttttagtatattgaatttggaaataaaaaatattattttatttataatattttgtttttagtattggtatttttatttataaaatatagtaatttttaatcgttgaaaatattaaattttagaaaatgtagtatttttacgtatgatggtaatattgtttttgaatagttattagttaaagatttattttaatttaatttttttgaaatagatgattttgatgatttagataattttgatgttagttttgtttagaaataattttaaaaatagtttttatattttatttttatattgaaaatttgttagatttgttttagttttaaagagtatattaatgtaaaattaaatgagcgttgggtagtgagttgtatttttttttttaaatgggaaaagggttaaatataatgtatgtatattttaaaataattagaagtgaggattttgaaagtttttattataaagaaataatgttttagatgacggatatgttaattattttaatttgattagtatataatatatatatgtgttgaaatattatattgtattttataaatatgtatattacgtgttaattaaaaataaaataatttttaaaaagaaatatataaattttttaaatttattggtatttgggaatattaataaattttaaataagataaatgtaatgagatttataaataaaaatattgtagtgaaaatgttgaaagttaaggataaggagaaagttttaaaagtagaaatagaaaaatagtttattatttataagggaattttaataagattaataggtgattttttagtagaaataaaagattttagaaaaatatgggaaaatatatttaaagtgtttaaaagttgttaattaagaattttatattttttaaaattattttttaaaaatgaaggtgaaataaagatttttttagaagaataaaaattgaatttgttgttagaaaatttattttgtaaaaaaaagtgaattaatattagaaggtaatttgaatttatataataaaagaatattgataattatgtaattataaatgtatatttttttttttttatttttataattgatataaaaatgaattgtataaaatgatatgtatatattgtattgttgggtttataatatatagaaaggaataagatatgtaaatatatttgttaaatatagtgtaaatgagttaaatagttaagttgtattgggttaaggaagtaattatatatgttaaagtaataattaaaatattgttgaatttataatattgagaggtaatatgtataataataatgttataaaaaaaggaagagaagggaataaagttatgtagatgatttataatttatgaaggttagatttataattttttgattttataatgatatgaaagtgatatatagttagtagaagttatattttaaattttgaattttgttttttttttaggttattgatatgtgatattataattattgataaaataattagaaaaaagatcgagaaaatagaatatttgaataatattataattaagtagatttaatagatatttatagaattttttatttaataatagaatatatattttttttaagtatgttttttttataatgttgggtagtgatagtaagttatagtttttagttagtttagtaattataggggtaaataagtaatattttatagtgtacggtgttattaagtaatgatgtgtattatattaggtgtattaagtgaatttttgatttataatatttttaatttatgatgatataattttattataagtcgagaattatatgtataggatataagttaaaaattatatgtataggagtaatatttttatatattacggtaattattttacggtaaattttagagtagttattaaaaaaaaaaaatttaaaaagaatagtgaaaatattattaaagaaattaaaatgttatattatgaaatatttatttataggtattagttattatttatgtttgtaattttagtattttgagaggttaagatagaaggattatttgagtttaggagtttgagattggtttgggtaataaaaaatttttataaaaaaataaaaaaaattggttgggtatgttggtttatatttgtaattttagaattttgggaggtgaaggtaggtagattatttgaggttaagatttaagagattagtttggttaatatggtgaaatttttcgtttttattaaaaatataaaaattagttgggtatggtggtgtatgtttgtagttttaattatttaggaggttgaattatgagaatagtttgagttcgggagatagaggttgtagtgagtcgagtttatattattgtattttagtttgggtgatagattaatattttgttttaagaaaaaaaaagaaaaaaaaaattaaaaatagaaaaattagttaggtgtggtggtgtatgtttgtggttttagttttatgggtagtaaaggaaggagaattatttgagtttaggaggttaatagtggtagtgagttatgtttatgttattgtattttagtttgggtaagagagtgagattttgtttaaaaaaaaaaaaaatagataatatttatttaaaagagcgtaataaaaggagaaatagagttataaaaaaaagacgagatatatagaaaaagtaaaagtttagatataaagttaattatgttaataatattatggatgtgagtggaataaataattttattaggttggatacggtggtttatatttgtaattttagtattttgggaggttaaggtgggtggattatttgaggttaagagtttaagattagtttggttaatataatgaaacgttgtttttattaaaaatataaaaattagttggttgtggtggtaggtgtttgtaattttagttattcgggtgggtgaggtaggagaatcgtttgaatttgagaggcggaggttgtagtgagtagagatcgtgttattgtattttagtttgagtggtagattaagattttgttttaaaaaaaaaaaaaaaaaaaaaaaaatttttattaaaagataaagattgttagattttaagaaaatatgatttaattatatgttgtttatagaagatatattttagagtgaaaaatataaatagattggaagtaaaaggatagaaaagatatgttatgtaaatatataaaaataagaaatttaattgtggttatattgatattaaaaaaaataaattttaaaataaaaagttattagagatggagagggatattttgttaattataaaagggttaatttattaggaagatataattattataaatatatataattaaggattaaaatttatgaagtaaaaattgatagaaagggagaaatagataattgaatattaatcgttggagattttaaattgttatttttagtgatagataaaataattagaaagaagattaataagaaaatagaatatttgaataatattataaattaattagatttaatttatatttatagaattttttatttaatagtatatatattttttttaagattatatggaatattttaaatagattatatgttaggttataaaatgagtttttatatatttaaaagaatattagtaatataataaatgtgttttgatgataaaaaaagtaattaaaaataaatgtaggaagttttaaaggaaatttataaatgtggaaattgaataaggtattattaaataattagttggtttaaaggaggaaaaatatgttttgggataaagataagttgttagtaattgattttaaagagaggattatagaaaagttgtttgatagaaatttaaaatatttgttttaaggaaatttggttaattttaataaagtagagaaaaataatttagaaatttattagagaaatttaatagagagattgaaataattttttaaaattaaatagaaatttaggagttaaaaattataatgaataaaataaaaaatttaatagaaagtattaatagtagaattgtttaattagaggagtattagtgaatttaaagataggttaattgaaaatacgtaattaaaggtgaaaaaggaaaaaggaatgaagttataggatttatgagtaatatttaaagagtaaatatgtgggttattggtgtttaagggggaattttgaaaaagagaaagtagtagaaagtttattaaagaaataataatagaaagtattttaaatttggagaaagttatagttatttacgtataggaagattaagggtaattagttagatttaatttaaataatattattttataatatattataattaaaatgttaaagattaagtataaagagaggattttgaaagtagtaagagaaaagaagtaaataatttataagggagtattaatatgtttaataagagatttttaagtagaaatattgttttgaagaaatttaaagttttaaagaaaaaaaaattaaaattattaattaggaatattatatttattaaagttgtattttagaaatgaagaaaagaataaagatttttggacgataaaagttgatggaatttattagtattagatttgttttataagaaatgttaaagggagttttttaagatgaaagaaaaggatagtaatgagtaatataaaaatatttgaaagtatataatttattgataaaagtaagtatatagttaaattttgaagtttttaatattgtaatggtggtatgtatattatatatttttttaagaaggttaagataatataattaaaaataatagttacgataatttgttaggggatatgtaatataaaaagatataaattttgatattaaaagtttaaaatgggggagtggagttaaagagtatttttttttcgattaaagttgttattagtgtaaaataattttttataattataaggtatatttttataagttttatggtaattataaagtaaaagtttataatagatatattaaaaataaaaagtaaagaattaaaatatattattagagaaaattatttaattttaaaggaagaaagaaagaaaaaaagaatttataaaattagaaaaaaattaataaaatgatagtagtaaatttttatttattaataattattttgaatgtaaatggattaaattatttaattaaaagatatagagtagttaaatggatttaaaaaaaaagaaaataagatttaattatatattgtttataaaagatttgttttatttataaggatatatatagattgaaagtaaataaatggaaaaagatattttatataaatggaaattaaaataggagtggttatatttatattagataaaatagattttaagttatttgtaaatagagataaagaaggttattatattaatatatgataatggggttggttaatttagtaaaaggatatgttatatatttaggtgttttgatgttgggtaaatgtatatgtatttaatgttagagtatttaaatatataaagttaatattaatagattttaagaaatagatagattgtaatataatattagtagaagagtttaatattttatttttagtaatggatagattatttagatagaaagttaataaagaaatattagatatgaattgtattttagattaaatggatttaataaatatttatagaatattttatttaataggtatagaatatatattttttttaattgtatattaattattttttagtataaattatatgttaggttataaaataagttttttaaatttaagagtattaaaattttgttaagtattttttttgattataatggtataaaattagatattaataaaaggggaaattttgaaaattttataaatatatagaaattaaataatatgtttttaaataatgagttaatgaataaatttaaagagaaatttaaaaatattttgagataaatgaaaacggaaatataatatattaaattttatgggatagagtaaaaataattttaagagggaagtttatagtaataaatgttaatttttaaaaataatttaaagtttaaattttgagaatgatttattaaatgtaaatattttgagaaaggatattttttttattaaatattaattaatattttatgagaaatttgttttgttgttgttttgttttgaatagatggttttttttttgttgtttagattggtgtgtagtggtataattatagtttattatagttttaaattcgtgggtttaagggatttttttttttagtttttttaggggttgggattataggtgtatgttattatatttagttggatttgttgatagttagtaaaggttgttaggtattatattatatttggtaatgataaaaggtgaatgagataggtgttagtgataggtaaaatgagaagatgttaaagataaattttgtttagagttagtttgggttattttaaaatatttagtttgttatttttgtaatatttagttttttaagatggcgtataggattaataaggtagtttttgttatttattatagagtattgattaaataatttattattttgtggttgttattttgattttgaatttattttttaaagttttgttttaaatatttttttttttaaagattatttttttaatgaaaatataggtttattttaaatttgtataaatataaaagggtatattttatttattatgttttaattataatattatatgtaagtaaataatttattttataaaaaaataaaaatttaatgaatggtagtagtttaattattttaagttgttagtaggtataaagttaaatattttttaaaaatataaatagttatttatgatttatttgtgtttttttttttttatttaataaatgttagtataatagagtgattaagaaggttgatttggaggtagattgtcgaagtttgaatttttattttataatatattagttatgtgattttgggaagttattttgttagtttatgttttcgtttttgtatttgtaaaatgggaaaaatttagtagggttgttgtgaataataaaatatattaattatatagaaagtatttagaattgtgtttggtatattttaatatttatttaatgttagttattattattagttattgtatttttaagtagaaattaatgtttttttttaagagttttttattagttagaaataattttttttggtaagtttaaatatttgtcggtaaaattgtttataaaagtaatggagttaatagagagaataagtattaatgttttgaacgggttgtgtattatatagtttgaaagttttaaagttgtttattttattattttataaatattagagttagaggttttaagattttgttaagttagtttttattatatttataatatgttaatatgagatggataagatagtttggtcggttgttaagttatgagttgtataaatattagtacgtaataaaatgattgtaaaagttatgtggtttttattggttatattaaattatatttgaagatttttgtttttttagttgtaaataattgggaaaagagtgtatttgagagtaagatttaaatttaaataaattgtaaattttttaatattttggaaattttagtttagtttttttttatgtgtaagattaaatttagtatagtttataatttgaaatttaaatatattattagtatattgggttttaattttagttttgatttatatagtattattaatagtatggtttaaaatattttatttttttttaaatgaaaaatataatgatatgtattagttttattagataaaaaaagattaaatgagataaatattaataatagtagttgtaattgttaataaataatataggaaagtattatttatttgaattttaagattttttttttttatatatatatatatatatatatatatatatatatatatatataaatatacgtatgcgtatacgtatagagagagatacgtatatatatagaaaaaataaatttgagttaaggaataagggagaaagtataaaaaggaaataatttaatggtttttttaaatattgaaaaaaaaagattttgatatttagaagaatatgaagataaataaaacggtatgttgttaaagagaaggattgtgtaaaaaaattatagatatgtaataaataatataaaggaattgagaaagaaataatttattttttagttagaattaaaaatgaagtttttatgtaattaggagttttagggagaatataattatgatggaataaattttatttaatagatttggttgagataatattataaattattataatattataaattaaataaattaatatttaaaatagtaaattgaaaatagaatgttataaattatatggagttttatatttaatattagtatagtttatgtattttttgtatattataataaaaaagtaaaaataataatgttaataatagatgtgaataaataatatatatattaagaaatacggatttttttttttaataaatatttattaaatgttgattaaatgaaaaataatattataagttaaaaaagtagagtgaaattatttttgattataaaattagtgattaaaaaatattttatagattgtttgagtttaggaagttgaggttgtagtgagttatgattatattattgtattttagtttgggtaatagggtaagattttgttttgaaaaaaaaaaatttttagtattggtaagaatatagttaaatagttatttatatgtaggtttttggtaatgtaattggtttaagttttttgaaagataattagagaagtatattaaaaaattttgaatgtgtttatatttttttatttattaatttatttttaggaatttagtgtaaggaaataattagagatgtatatgattgatataaaaggatgtttattgtatatttatttataatagtaaaaaattgttaataatttatatttttaataataagtaatgaattatataatttgtaatatagttatatgaaggaatttaagttattagtttaattttagaaaaatatgatttaatggtacggaaaattgtttatgttagatttaaatgtaagattataaaaagttatatataatatgattgtaatttttttttatatatataaatatatatatatataattaaaaattggaaagtaaatattataatgttaataatagttttttttgtgtaatgttagattattttattgtattttttattaatttataaattttttataataattatgtattatttttgtaattagtgtagtgatttttgtggttaaatataaattgttttttttaagttaattagggaaattttatttttttgttagtgattgtattttaggttaatacgtggagatgtttggtgtaggggtttttaggaaagatttttttgttttttataggaaaaataagagaagaattgtttttttttgaatattgttatgatcggtatgatttatttattatttaattatttatttaaaaatatttattatgtagtaggtattgtggttaatgaaaagatgtaatttttaatttttgaaatattttatagtagattggaaaatatataattgagtggggtagtagatatgtaaataaaaattttaataataatgtgaaattgatttaatggtagtatatatatataacgtgggggtataaagattttataaattagaagagtttcgagggttgattattgtttaagtaaagaaaaggggagtattattagatttagtgtttagttatagtatttttttggtacgtgtaaaggtttagagtttagtgaggtatggtggcgggtatttgtagtattttttataatttaatttttaaaaggtaatatgaatatatttttataaattattttaaatattaaataatttgtttttgaattttgtattttatttatatataaatatattaattatattaaggttattagaggaagtaaatagttttttttttaagggaattttttaatttattaaaataataattattattattttatagtagttattatttatatggtgtttattttatgttaaggataattataagtatcgtaaatttattttagtttttataattttattatataggtgtggaaattaaggaaaagagaagtaaatattttgtttaaatattttgtttaaggttatatattatgtacgagatggagttatttattaagaaatatattatgtgtttatttatatggtatgttagttttttattgttttttgttgtttttatttataaaagttagttttttgttgtttttatttatattaaaagtaaaaatttttaataattttaatttaaatttaaggaggaattattattttttttaagtatgtgtattttttatttatgtttatattggttaattttttttttaagtttttttatttaatattatttatattagtagtttttttttaagatttttagtggatttttttagttgttagaggtaatgtttttgtttgttgtttatatttatatatttaaagtttatttatttaaatttttgtggggaaattatagataatgtttgtttttgttaaaggataaagggagaaaaatgttttttatagagttaaaagaattttatttgttaaattaatttgatgatgttggatgaattgaatatttttatttgattattttattatttgttatttaatatgaaattatataattttttaagtggaaattatttaaattgttttttaaggaattaaattagaaaatttttttttttgtgtataataaaaaggtaggtatgttttagataggagttgtatagagtagtatttttgtaatttttttttttgaataaaattgtatttttgttttgttgtataaaaatttaagatatatatttaagataaggaatttggtatggatttttttttattattgttatatggtagtaaaattagtttttttagttgataaggaatttttgtttttttaaattgaatttataatttattttaagatttttgaaattttatttattagtaatagatttatgattttagttttttataatttttgtatagaataagtatttttgatattaaaataaaatgttataatttaattttaatattaataagtggaataattattttttttatttaaaaatatttttgttttttttaaaatataggttgttttagtaataataatttgtaaagtaggattttatttataattttattatttaagtcgattatgtttgttttatataatatgatgtttttattaagattatatataggagaaaattaaatttggtttggttagtataataattatttgttatagtagattttaagagttatatatgttaagggattttttttatttgtttagttatttgaaaatcgttaggttattttttgaataggttttgattgtgatttaattttagtatgtattgatgtaaattttattgataagttatattttaatataagtgtttatggttttgtgttttatatggatttatatggatttttttttatttgtttttataggttaattgagttttagtatttggtttatgtatttagtatgttttattttggtttttgacgttttggttattaagtttttgttaggggaaattttttatgtttttttattttgattagtttgttgataatttgaatttagtgtttttatttgattatatatagggtattttatttttttttttttttaatttttaatgatttttttttttgtttattgttttttgttttttttaagagttttattttagattaggtttggtagtgtaagcgtgtaattttagtatttagggaggttgagatgggaggattattttagtttaggagttttgagattagtttagttaatagtgagattttatttttataaaaaaatagataaataaaaattagttaggtgtggtgatatatattagtagttttagttgtttgggaggttgaggagggagggttgtttgagtttatgagtttgaggttgtaatgagttacggattatgttattgtattttagtttagataaaagagtaagattttgtttttagaaataatgataataagaagagtattattttaatttattatttttatattttattattttgttttttatagttttttagagttattatataaggtttagatttaaaaatttttttttgaatttttaaaatatttgattaggtaattaatgtttagaagtatatataattttaataaatagtattatttgtttgttttttgttagtaatagtatatataaattaataggtatgatttttatataattacggagtatttgtataattagtggttggagtaagaattgaaaaattatataattgaattttgaagtgcgcgtgagtatagtatatagaaattatattataaaaaggtagttattttttatatttgtattttacggggggataataattttatgtgttattatttataggtttatgattgagttaaaattttaaatgatttttttttataaaattaatataaatttaaagtatattaatatattttttattgtttatttaaatttttaaaaatttgttttagtttttaattataattgtatgatattttattgattgattgagatagggttttgttttgttatttaggttggagtatagtggtgttattatggtttattatagttttgatttttaaggtttaaaggatttttttattttagttttttaaatggttgagattataggtatatgttattatgtttgattaatttgatattatttttattttttgtggagatagggttttgttatgttgtttaggttggttttaaatttttgggtttaagtgatttttttgttttagttttttaaagtgttgggattatagatatgatttattgtgtttagttatacgttttagaatagaaattagatatgtttgaggtttatattttttgaaagattgattttagaaaattggtttttatgttatttaattttgtagtaaattttaaaaaacgtttggtaattgttgtgaattagttaattttattttttgagtaggtatatatgttattgggttttagaagagtaatgtttaagtagtggaagggtaattgattaaaattatataaaattttattagaagtgataagggagttttttttgttatgtaaatttattttttggggaattttgggggatttgagaaataatatttttgtttgggattatatatgttttattttgatttatagatttttaagttttttgttattagggaaattgaggattttttaagtataattaatgatatttttttgttagtaatattattattttattgtgattaatacgaatattaatttttagatcgaagaagttttattatttttaagaaggagattttgaaaaagggatttgagtagagtagtttatttggataataaagggaatattattaagaaagtagagaagtgatatagggaattatagttaatgaaaggagggttattaagttaattattagagtgggtaggtaattagagtttagtttaataagatttttggaaaatgggataaaatatatttttttgaagtaaaatatatagtaaaattgtagaaattaaaggtaaagaggaagttttaaaagtagatagagattataaaaagataaattgtttttaagggaatattgttaagaataggaggtaaagatataaaaagaaaattataagttaatatttttgataaatttagatgtagaagtttttatttaatataatattagtaaatagaatttaataatatataaaaaaagattatatattatgattaaatgaaatttatttttgggttgtaaggatgatttaatatacgttaatttatgaagatgatatattatattaatagaattaagaataaaaattatatgattattttaatagatgtagaaagagtatttgataaaattcgatattttttatgataaaaaaaattgttaataaattaggtatagaaggaatgtatattaatataaggttatttgtgatagatttataattaattatatcgattggggaaaagttaaaagtattttttttaaaattaggaataatataacgaggtttatttttattatttttatttaatatagtattggaaattttatttagagtaattaggtaagagaaagaaagaaagggtatttaaattggaaaggaggaagttaaattgtttatgtttatagatgatatagtatatagaaaattttataaattttattaaaaaaaaattattagaattaataaatgaatttagttaagttgtaggatataaaattaataaataaaaattattagtgtttttatatattaaatattaatagtaaattatttgaaaaataaattaagaaagtaattttatttataatatttgttaaaaaaaaagaaataaaatatttaggtataaatttaattaaggatgtgaaagatttttataatgaaaattataaaatattgaaaaaaattgaagatatataaaaaatgggaagatattttatgtttatagattggaagaattcgtattttttaaaagttcgttaaaatttgtatggaggttgggtatagtgatttatgtttgtaattttagtattttgggaggtcgaggtaggtggattatttgaggttaggagtgcgagattattttggttaatatggcgaaattttatttttattaaaaatataaaaattagttgaggatagtggtaggtatttgtagtttcggttattcgggaggttgaggtaggaggattttttgaatttaggaggtggaggatgtagtgagttaagatcgcgttattttattttagtttaggtgagagagtgagattttgttttaaaaaaaaaaaaaaaaaaaaatatatatatatatatatatatatattaagattttaaagagttaaagtaattttgcgttaaaaaaataaagttagaggtattaattttatttgattttaaaatatattataaagttatagtaagtaaaatagtagagtattgatataaaaatatatagataaatggaatagaaaagagaatatatttatagttaattgatttttgataaaggcgttaagaatatatattggggaaaggatagtttttttaatgaatggtgtttaggaaaattggatatttatatgtagaaaaacggaggtagattttattttttattatttagaaaaattaatataattgcgagttgggtttggtcgttttgcgggagttatggcggtttcggaggcggtggcggcggcggggtttacggttttggcggcgggtgttcgcgtcgtttcggcggttacgagaggagttttcgtcgtcgtttcgggttcgtgggtgttttcgggatttcgattgaggggtagtcggtcgcggttcgcgggggtgacgtagtagttcgcggttttcgtgttggcgggggagttgatttagtagtaggtgagcgagttgttttagattatatggtttaatattttgtgtatcgtgcgcggttgtcgtaagattttgtttaatagtttcgcgtttaatatgtatttggttaagagttatcgtatgtagtatagtatagttaatttaataataagaaaagatttgaaaattgtatcgaaattttattgttgtttaatcgaaggttgttttagaggttttgatagattatttttttagttttttttcgtaaaatagtattttatgaaaatttatgttgagaagaagtataaatgtagtaagtgtagtaattcgtacggtatagaatgggatttgaaaagatttgtagaggattgtggtaagatttttcggtgtatatgcggttgtttttacgttagtagaaaagtattgtagttttatatttatcgaattggttacgagatttttgtagaatatagggatttatttagtaagaaaaggaaaatggaaaattgtgtaaaattagaagttatttaataagattattgaattatttaataattaattaatttttagattagatatttaagaattagaagttttagaaataaagttagaattattttttgaagatttttgtggttttaatattgataagtagatttttttttataatattatcgagatagttttaaaagttgtttttattaaagtttaaagtggttttgtttaaattattcgtgatgtagtttttttttatgtttgtttttgtgtttatagtcgattttttagtttagtttgtggtgttaggtgttgattagggttttgttataggggttgtgtatttattgtttgtttttgttagtaggaattttgattttcggtttagatttagaggtttgtttttttaaagagagtttattttttttttaaattgttgattttgttgttgttgagttaataagtattggtgtttaagtgaatttgggtaaaagtttatttaatattttataagaattagggaatatatgttagaagaacggtatttttttaattaacgtgtagatagatttgttttatgttttataaaattttatattttttgtatagtgggttatcgttgatttttttgtgtcgttttgtttttaaattgatttgttgtttgatttttaagtgtttttttttattagtgtttatatttagatatttttgtttagttttaaggtaattttatttatagttgtttagattgatgtatttatggatatttgtttttagtcgggtggggttttttgagaaatttaaattagtgggatataaagtttaacggatgattatgtatagatggattaagttggaatgtgtagagatatttttgagtgtttatttattatataatgttgttataagtaatattataagtaatagtttagtagtagagatagtaatttatagtttgttattttagaatgagtttaagattttaaattaagagattgagaaatgtgtattaattataaattttagtgtatagaatagtatgttttttttatagaatatgatagataattagatttaaattatagatttattaagtgatttggaaaatattttgttaagtaatttgtttgtttagatattggattattatagttttttgtttaatataaattttggatttgatatttagtttttatttggtttagtttagaattttggaattaattttgatattgaagagtttttttcggttttatatatttagatttaaattgaagagagtgaatttagtattatgaatattgagttagttttggagttattggatatagagatttaaacggattttttattcgtagatatttttgtttagttttatgggtgtaggggaaattttaattttttaggttttgagatgtttgatagataaatatagatagatttaaatttttttttagatagtagtttttatttgtttttgggaagtattttgaaatattttagtttttttatgagtattgatttatttgatatagagatataaattgaaggaatttttattgttaaagatatatttgttttagaaagtaaagtttagttgaatagtatagaaatatagattatgagttttgggtttgaaattttggggagtttgttttttattaataacgaaatttaaataataatggacgatttttttttggttgatatggtttggaatatgatggagttttagtttagttttgtagaaatttagatttttgcggaattatatatagtttttaatttttaaaattaatagtggagtttatgtgtgagacggtatttattattttttttggattaaaattacggacgggggataatagtattaattcgattgaatgtggttgatgatgtagttgtttagtttttttgtagttttttgttttttgtatttgtaaatagaaatttgtgtataaatgtgagtgtattataaagtttgagatgttgatttaaaaaaaaagaaaaattaatataaaatgggttaaatgtaatatttgaaattatgaaattattagaagaaaatatagagaaaatgttttataatattggttttttgggtaaagattttttggataagattataaaagtaataaaagtaaaaatagataaatggaattatattaaattaaaaatttattaaattaaaaatgtttttatagtaaagaaaataatagcgtgaagagataatttatagaatgggagaaaatatttgtaaattatgtatttgagaaggtgttaatatttagaatatattatataaggaatttaaatagtttaatattaaaataaaataaaaaataaaataaaataaaataaagtaaaataaaataaagtaaaataaaaaaatttgattttttaaatggttaaagggatttgaattaatttttttttaaagaagataaataaatggttagtagttatttgaaataatgtttaatattagtaattattagggaaatatatattaaaattataataagagaggattatttgaggttagagtttgagattagtttaggtaatagagtaaaattttatttgtataaaataaaaaattagttaggtaggatggcgtatgtttgtagttttggttatttaggaggttatagtaggaggattttttgagtttcggaggttgaggttatagtgagttatgattacgttatttattttagtttgggtaatatagtgagattttgtattaattaaaaaaaaaaaaaaaaagagtataatggttgttgttaggggttggtaggaggggaaattgagaggtgatagttaaaggtataaagttttagttttaaaagagaagtaaattttggagatttattatattgtatagtgtttatggttaataatattatgttgtatagtaaaaatgtattaaaagagtagagtttatattaagtgtttttattatatataaaaaaataataataaaataggtagggggaattttgggaggtgatgggtatgtttatagttttgatggtggtgataattttatgggtatatatttatttataaatttattgagttttatagattaaatatgtataattttttatatattaattatattttaataaagtgattttaaaaattaaaataaattttttatatttgaaaatattaaggatttattgtataatatattaaaatttttttattatattttaatttaaaatgattaaggattatgatttagatatattaattaaatgtaataagaggttttattgtttgaaaaatagaaaagtagtaaagagatagatttttaaatgttatgtttttggatgataaggaaaattttgaagaaataggtggaaaaatttaatagatttgaaaataaatgttgtttttaaaaataattatgtggtttttattttaaaaaatttattgatatgtttttatattaaatttatagagttttgttaggtttttttttttaatttaagggtaattaatttgaattttttaatagggttttagtaaagtataaatgaggaaattatatatatttaatggattagaatattttaagtgtatggatttcgatatgaagatagaaagtggagaaaaggtaggtaaggtgtatttagttagttaaataaatatagttatgtgttgggataatattgggttggttttatatttagagtatatattaaaataaagaatattaaatatgaatattgatatttatatttaagatagttataattggattgaagcgggttagtttttatttatagaatatttttgatatgtttaaaaatttttaaaattgtaatgaagtttaaaggtaatttatggtttttatatatttaggaatggagaaatgttttaggattttggttaatttttttgaagaaatttttaaaattttttttattttaaataataatattagttatagttattgaatttaaaatataaattaaaattgtagagtgagaagtgttatatagtatagtagattaagtggagtatttaatttagatttggggtgttgaggaaagtttttagaaaaagagatttgatattgagaattgaattatatgtgggggtttattaggggaatagtagattgaggtaagagggatttttagtaaagtgtagattaataatataaaaggtaattgtttagaattttgtttaaattagggatgttttttttttttaggtatttatattgatttataataatggagataaatattttagggtatttagagatagaggttagttaaaggaatatattattcgtgtttttatattttgattttattattttttatttttttgttggtgattggtttatttatatagtatttttttttttttttttcgttttttttttttttttttttttaaggtttttaggaaattcgtttttttagaaggagatatagatgtttataatttttgttggtatgtttgggtaattgtttttaaatgaatgttgatttttgttattttttttggagagaaaggaaaggttgtggtgttatttaattatttttattattttatttgtgtaagatttattagataggttttttattttgtaataaaaatattaaaataatattaagtataatttttataaaaggattttttaaaagaatttgataattattatatgttttttttttttgtagaaatatgtataatgtattttttggaagaggggtatatagatttgagtgtggtttattaatggataaaatgttataataaaatttttcgttttttataagaaaggaaagtattatgatatgttaagtgtgagggggatttttggttataaaagtatattttattaagattgttattttgtttaagtaagtagtagatggatttaaaaggattttataaaatagagtaaggattttggattttattttaagagtaaaggtaagttattggaggatttttagtattaaagtgatatatttagatttttgttttagaaaaattatataagtaatatagaaaatggattattaggggagataagattatattgtaagatggaagattattttatagtaattgaggtttagtttagttatatgaaggaatagagaaaagtatttagataagagatgtttattagggagaatatatagtatttagtatttagattagatatagtaaaaaaaaggaatagagaggaggtaaagatgttgtttaggtttttgattagagaattagatgtgttatgttattatatattgaaaggggtaataaaggagtaggaatatatttggataaaaagataggtttagtttagggtatggtgagtataagagatttggggtatttaaatgaagaggtttaataggtagtgggtatgtgaggaagaggttaggaaataggtttgagttgaagatatagatgtagaaatattaatagagagatagtaattaaagttatggaaatggatgagataatttagggaggatgagaaaaggtttgggttaaggataatagagatatgggagtaaaggatggtttagttggtttgtgaatatttaattgaagaaaacgttttgtatttagggagaagtagtatgagttttgttgagattaattagtagatttgtagtttatttattttgtttttagttgttatttttaggtttagtttgttatttttataaagattatagttatttaaaataaataaaagtagttaaaattaattggtaaaattattgttttagttttatttagtagatttgaagcggatattatttgtgtagttaagtaatatataaatataagaaattaattttgtattataaacgtaatttaaaagttatattaggatagtatagatatatagtaatattagatagaattttaaagtgttataaaatataatgattttattttttggttgtaggttttaaaaatattacggtatatatggttttaagattttaaattgtagttatgtttttaagttagtttgtttttttatttaagtgttgatagataaaaaatatagttttagtttaatatattatttattttatttttaattttatttgagttttaagggtatttttgtaaagtaataaaaatgtgtagaatcgaggttaattaataattagttttgaaaatttattgaatttttaattgtataatattaaaatttttataatttgtaatgagtaataagaaaatttgaaatttttttagttttgtttaggatttttttaaagatgaagaatatattattttaagaaattgtatgtggtttttttgtatgttatatatatagttttttattaatagtgattttattgttagatatttatatgtagattatattttagtaaaaaggttttaaatttagtattgaaatcgttatttatatttaatcgtttttttggagtaaaattttgttttttaagttttagaataggttttattttttagttaatatttaattttttgttaaataaaagttattaatggtattataaatatattgtatttttgcggttttgtagtggtttatatttgtaattttagtattttgggaggttgaggaaggaggatcgtttgagtttaggagttcgagattagtttgggtaatatagtgagattttagttttataaaatattaaaaaattagttagatatggtggcgtatgtttgtggttttagttatacgggaggttgaggtgggagaattgtttaagtttgggaggtcgaggttatagtgagttatgttcgtattattgtattttaggtagggagatagagtgagattttgttttaaatgtatgcgtatatatatatatataaaatggtatttttgtatatttaaaatttatttttttaaagtttgtttatttttatttattattgattggtaatgtatgtgttatggatgttatattttttattattagaatttttagaagtagggattttattagttatttttttgtaagggtttatatataaaagttatttgatattagcggttagttaattttatggttttttaaatatagggaataaaaaaggaaataagttttttaatattttgttttatatttgaaatttagtaagtatcgtatttatttttattttttttattttagttttttatttttatttattgaaaaattggattatgaaatttaagtagaagggaaatttggtaatggtaagattaagaaaagggaagaagtttgaagaatttaaaatatggaggagaaaataagaaagaatgatttaagtaaaagattaaaaggaaaatttaagttaaaaataataaaaaggaataaaatatataataaaatatttgataaggtaatgttaggtgataattaagaaaaagaagtttgtaggaaataaatataatttttttttttttttttttagatagtttcgttttgtcgtttaggttggagtgtagtggtacgatttcggtttaatgtagttttcgatttttgggtttaagtaatttttttgttttagttttttgagtagttgggattataggtaattgttattacgtttggttaatttttttttgtatttttagtagagacggagttttttttgtttaagttgatttttaaattataaatgataggataattgataattttaaaattttagtttagggatatgtggttattttattttggtatttgttatattaaatattattgttgatttggggtgtttttacgttagaatgagaggattattattatttatattagttgttaagagatatattagcgattgggggttggaaagagagttagtggtaaagataatttcgtagtaggttaagggttgtataaaataagtttggtattgaggttaaaattaaacgaaatgaaagagaaataagataggggaggatgagaagaataaatatagtatgagagtgggttttttttatgtagaaggaaggtaaatatttgtaattatttggtggtgagtgttattaaatttaagattttgtttttcgtttgtaattatttttcggttaagattatataaagaaaaaaagagatttaaaggttaaaatgatgaaaagtggttaaagttagtataataataattattaaaatatatatatatatatatatatatatatataaaattgttaaagtaatagaggagttaatagtgtatgaagaatatttttgattgatttagaaagatgtttattataaatttttaagttaaataaggaagttgtagaaaaatatttataatattataatatttttgtataaaatatttatatgtgtaagtataggaagtttttaaaaataagtgttggtgttatgagggatttgttggggttttttgttttttttggttttgggttttttttagataaggttttgttttgtcgtttaggttggagtgtagtggtatgattgatttaggtttattgtagttttaattttttttaagcgatttttttattttagtttttttagtagttgggattataggtatgtattattatgtttagttaattttttttttttagagttgaggttttattatgttgtttaggttggttttaaatttttggatttaagtgatttaaagtgttgggattataggcgtgagttgttatgttttgtttgggatttgttgttgttgtattttttttttgtgttttttaatttaattgaaataaaaataataatagttttttaaaataaaagaaaaaaggtttggcgcggtggtttacgtttgtaattttagtattttgggaggtcgaggtaggtgaattacgaggttaggagatttagattattttggttaatacggtgaaattttatttttattaaaaaaaaaaaaaaaaaaattagttaggcgcggtggcgggcgtttgtatttttagttattcgggaggttgaggtaggagaatggtaggaattcgggaggcggagtttgtagtgagtagagatggcgttattgtattttagtttgggagatagagtgagattttattttaaaaaaaaaaaaaaaataaagaaaaaaataaaagaaaaaagattttttaaattatttagtttttattttgaattaaatatgtttaatttaatgaatttgtaaataatttttttaatgtagagtttagttttaggagagttgtttttacgtggtggatagaaggggttattggttaattttagttgtattttggtagaaagaaatataagttttaaagaaaaacggaaaggtttgaattcggcgttattatttattagtttatttagtgagttagggtaaatgatgtgaaatttttgagtgttaatttcgtttttttttgggagtgaaatagaatttattttaaagggttgttttgaggatttttgagaatagtttttatttatgaagatatagtttggtggggtagattttaggaaatttagtgatttttttgattaaaattatattttttgttattttaggaaataatttgtttcgagaaattttagaatgtaggtcgtttttagtgatttgtttttagtttgtgaatttttagatttattagtgtttagtagagtagtggggttttgatagttttttttaaagtatttgtgtttatttttttcgggagagtatagtaatatttagtatagtaaattagagtagtacggtttagatatgaaggtttgttttttgtaattttttgttttataaatatattagaaagtttagtaggggtaaaaaatagtttttttaagggttatattgtagaagtatggttaaatgaatagtatgattattgtagacgtagttatagatttagtatgtatatgatattttggtagagtttgtattataatggttgtttattttttagtgttgttttaaaattttgaagatgtttattataaattttagtatttttaagtatgttttgaatttaaaaaagtttagatttattggataagaaaaaaaagagagagggagaggtgtaaggtaagtatttagaatacggttgtatagttagattttttgtaaggatggaaaggttttggttttatttgtttatttaatattgtaggcgttagttgtatgtggtttttgaacgtatgtaatatggttaatgaatttgaggaagtgaattttgaattttatttaattttaattaatgtaaatttatataattaaacgtatttattgattatggtattggttagtatagatttagaattttgggttaatgatttgtgttaatttataaagggtgatatgtagatgagtgagttaagtttaaaaagggattagttaaaaaggagaatatacgcgtattagtattatgttaatatttttttgtaacgtatgtagtttatttttatgaagttgaggttttagtttgattttaatttgttttcgttagtttaggttgttataataaaatattatatatatggtggtttaaataatagaaatgtatttttttataattttggaggttgtaaagtttataattaaggtttattaggttttgttgagagttttttttttggtttgtatgtaggtagttatttgtgtttttatatgattttttttttgtgtttatgtggggagagatttttttttttatttttttttttaaggttattaattttattagattaggattttatcggtatgattttttaaaggttttatttttaaatatagttttattgggggttatagttttagttttaatttatgaatgggggaggggtggatataatttagtttataatataattttttatttttttttaattagtttttttgtaatgagttttaatatggaagggaagagataattattaaaaatatttttagaacgaaaagataggagtttttagattgaaagggttgattaagtgtttaagaaaatggatgagaagagatttatattaggtatattattatgaaattgtaaaaatataggaaggtagaaggaaattaaataatgttttataattttaaaggaaaataatttttaatttggaatttttatttagataaattattaattaaatgtgattagaataattttatatttaataggtagtgattagaaataatttattttttatatattttgttttaggaagatattagaatatttgttttatattaagaggagggagaaaataaagaaagaaaataaagtaaatagaagatttaatattaagaaaggagagaaggatgaatgatagtgaaggaaaattttagggcgattgtaaaaaagtttttaaataggaaagggaggggttttttgtatttgtttagattttttttttaaaatataatatttttaaaaatattaaaagaatttaaagaaatttttataatttttttaattttttttaaaaaaaagggggttaggagtgttggtttatatttgtgattttagtattttgggaggttgagggaggagattatttgagtttaggagtttaagattagtttgggtaatatggggaaattttgtttttattaaaaacgaaaaaaaaaaaataggtgggcgtggtggcgagcgtttgtaattttagttattttggaggttgagatataagaattttttgaatttgggaggcggaggttgtagtgagttaagatcgtgttattgtattgtagtttgggtaatagagtaagattttattttaaaaaaaaaaaaaaaaaaaaaaaaaagggaaaatagaagaaataaggtagaggtgaaggtaatagatgtagtttgttgtgttttttatgttgatggaaatagttaaagtttttttgaaaaaggtattattatattaattatgtgtttttatagttattaattttagattataatatggtatttgataatgtttggttttaattttttttattagaaaattaatagaattttaaaagtaagtttaaataagagaaatttaattgtttttttttgataaatgttgtttttttaatagagtattgaggatcgtttataaatagttatttaattgttttattatttaatttagaggtttttttaaaagtttaataaaaaaaaatttagtaaaggtaaatggaatttaatgtaattattaataaataagtaaagaaaataaaattattttatatatatagttatgtataaagaattaggttaaagtttagttatttagtatttttagtggatttttgtatgtttttaaatttggtaaatattatagaagatttaattggaaattagagtatagaaagaaattttagaaatgattatatggttaaaatgatattttattagatgttttattaagtggaaattaagaagaaaaaaatagattaagattggtataggttttgaatgtttgttttattttgtttagatgaaagataggattataaaaaaatgtgttttaaattattttagaataaaattttttttttaaatgtagtattttaaaatgttatattaatataatttttaaatagtaattatttttagtatttttttattttttaattgaataatgtaattgagttttattaatagttaattttttttaattttaattttaataaatttatttaagttaaatgattattaagaataaaagatttatattgtatttttgtatttttataatttaaaggtaataggattaaatgtttttaggttgtgaaaagatacgttatattttaggttaaaagtatattttattttaaaattaggagtgaaaataaagtttgaaaagaaatgattttttagttttgaatttggtggtattaatattaatgataattttatttattttaaaggtattttttagagtgtttatgttatgaaaattgggtttggaatgttatttttagtaaatttgaaattgtttaatttgaggttttgttagatttgtaatagttgtattgatgtttataattgtaataaggtttttatagtatggtatttttttatatattttttagatttggttggtataaatatgttgtattgattaataaaaatgagtttggtatttttttatatttataagtttagttagaataaagttttgttttggattaatattgtataataaatgtattaaggatttttagaagttttatggtattggttatagaagaataggataaaaatttttatttatatataaatatttggaaaatgatttagtttgtgtttgtgaaatttgaattttgtttggggaaaagatatgcgtattaaatatattgtggatttaatttgtttgttggtatttattgagggttttagggtatattattaagtagaaattggttgggtagtatttaaagattatattttttttaatgtttttatttatatagtagaaagatgtaatcgaaagtttgcgaaagatttgtttaataatgtttttataggaagttttagttttttttggatatcgaattattggtgtaataaaaagagtattagataggagttagtttttttgggtaatagttaataattttgttattaaatttagtttttttttttttaaatattttaaagagaagttattatttaaggtaaatgttttttgttaaaattagttgggtttgggtaattagaaatattcggtttttttgattattgaaaaggttattattttataataattaagatatatttaaaagttgtatatatataattaatttaagaagtttattagtagttatttttttttgggtaattttttgggaattttttaattatgagttaaagtaatttttttgaaaagtttttattttattttttttttttaatttttatttatttatttagtttttagatatagggtttcgttttgttatttaggttggagtgtagtggtatgattatagtttattgtatttttaattttttaggtttaagcgatttttttattttagtttatagttgtatgttatattgtatgggtttatagttgtatgttattacgtttggataatttttgtattttttgtagagataaggtttcgttatgttgtttaggttcgttttgaatttacgggtttaagtgatttgtttatttttgttttttaaagtgttgggattataggtgtttagttttgtttttttttttttaaaatgtttattttattttagtatatatggttattgtgagaattttatataatttatatggaaataatttggaaagtataaagtatttttaatagggttattgtttaaagtaatgttagaaataaattaagaaattaaaagaagtagttaataaaaaaaaattatgtttataaaattaacgtatttgtataaaattaatagaataaaaagttttgatttataaagggtatatagtattttattgtttaagaataataataattttttttatagatatgaaatttagaagttattagagaattttgattaatgtagtaatttttttaataagtatgataaatttgttttgatttgtttatttttttttaagtgttagtttaataattgaatgtattttagaattatttaaaatttaaattattttagataaaggttataaatttaaagtttataatagataagttaaatgagtaaagtaattagataggtttgtggtgaaaaatagtaattgtttaaagaagatagttagtaggtatagtttagtggtagagtatttgattgtaaagaagatagttaggattttatttttgttagttgttgttggaagggaatttagatttgttgttgtttaattgtttgttttagtttgttttgtgttgttatattagaatatgtgagatttagtagtttataaataatagaaatttattagtttttagttttggaggttgggaagtttaagattgaggggttatatcgtaatggaaggtattatatagcgatagagtataagagggttaaattcgtttttataataaattattttatgataatattaatttatttatgtatattagtaatattttagaaataatgtttttaaaataatatgtagttatttagttatagttattttggttataaaataatgtaattaaaggtggttttgattaagtattataatatttttaaatatttgttttatttttattattttgttttaaaaatatatttttttaaaaatttatttttaaattaaatattttaggtttaattttttttttttttttttttgagatagggttttgttttgttatttaggttggagtgtagtggtgtaattatagattatcgttttttgtttgtttgtttgtgtaatggtttaattttagtttattgtaatttttcgagtttaagcgatttttgtatttttattttttaagtagttgggattataggtatatgttattatattcggttagttttttttgtatttttattagagataggttttattttgttggttaggttggagtcgaatttttgattttaagtgatttattcgttttggttttttaaagtgttgggattataggtaggagttattttgtttagtcgatttgtatttttgattattaggatttaagtgatttattcgtttcggttttttaaagtgttgcgattataggtatgagttattacgttcggtttagatttaaattattttaaaattaaaaagatagtataattttaggtaaatattagatgggtatagtatatacgtgtagaattaaatgaagatatttgaaattttgatagaatgaaataaatttttagtttttaatatttttaaaggaatgttattattaaaatttaagatatttttaagggtaggtatagtgtttgttttatgtttgtagttttagttatttaggaggtttaggtgggaggattatttgagtttaggagggtaagattgtaacgagttatgattgtattattgtattttagtttgggggatcgagtgagatgtatttcgaaaaaagaaaaagatatttgtattgtattttttttgtttataattatttaattttaagaaaaaattagttatattatattattttatataaaaatatttttgttatttttaaaattggttgtatagttttaaaaagttattatttattaaaatatttattattaagtaaaagttttattagttttgttaatttttttagtgtaatgattaaaaattttaatggtattagttagtattagaaatataagatatttttttgggtgttaaatattgtagaaaatattattttataaataaaatgtatgttgttatattaataataaacggttatttatttttacggtttatgattggaaatttttagttaacggttttaagtaaaagtagtaattcgatattatttgtataaatgtatattttatatagtgttttattataatttttaatatgtaggggtagataggttaagtaatcgttataatttatgttggataaggttatgtttgggtatattaaatttagaaagttagggttaaatataattgatttttttagataagtgttttattaattaattataatgtataatttgtatatattgtaaattattaaatatatattaagaattataaaattatattatattatttaggatgtttttggtttttagtaattgaaaatttaattttatttattaagataggttaagttatgatgtagtaatttttttttgatattatatgtttaatatgttatgtgggatatatatgtttgtggggtgggggtgttgttttgttttatagttatttatggatttagtatgataggtgtttagatattttaatatttagtttttagaattattattgtaaaaagaagagatagttaggttaggaatttgttattaaatgtttttatttggaaataatttgtttaaaatttattggttagaataattataatgttttatttagttgtaagtgaattgggaaatgtgagggaagatttaaatatttagtaagtattaaatgtttttgttgtattaagtaaaattagttaaaataataatgggaggttaggtatggtggtttatattttttattatagtattttgggagatttaggtaggaggatagtttgaggttgggagtttaagattagtttaggtaatatagtatgattttgtttttataaaaataatgataattaattagttagatattgtggtgtatatttgtagttttagttatttaggtggttgaggtggtatgatttttggagtttaggagtttgaggttgtagtgagttatgttcgtgttattgtatttttggttgatagggtaagattttgttttaaaagagaaaaaaaaaaaaggagggggggaattcgttggtttaagaaattggtaagtttagaaatagggtagattttatagttgatttgtttttttattttgttttttttatgatagtaaaatagttttagttattatagaagttatattatatttatattatttaaaaatagagtatatatttttgttttagtattttaagtaagagatagattttagatgtatttagattggatttgtttgagtttatgtttatttttaattaatgattgtgacgaattaataaaatatattttttaaattaataaaagtttatttttaggagttagaggtagtattagtgttttttagagtttatagaatagtgattattaaaagaaaatttagggtttgttatgatagagaagggaggaaaggatgttggtatttaataaatattaatgtagttatataataaaaaagaatatattttgaagaagttggttaagagttgtggaaataagtatatatatataaggtaataatatgaattgtagtgtataaagatagaggaaaagttattatgtataattataaatggttattaataaattaggcgttggttaggagcggtggtttacgtttgtaattttagtattttgggaggttaaggtaggcggattacgaggttaggagattaagattattttggttaatacggtgaaatttcgtttttaataaaaatataaaaaattagttgggcgtggtggtgggtttttgtagttttagttatttaggaggagaatggtgtgaattcgggaggtagagtttgtaatgagtcgagatcgcgttattgtattttagttcgggagatagagtgagatttcgttttaaaaaaaaaaaaaaaaaaaaaattaggagttaataaggaaatttattgagtatagtatttgaatgtataagtataattataaaaataggattaggttaagtataatgttttataatgttatagttttaagtaaatagtaataattaataaaaataaaatgataataaaaaggaattagttataggagggtgttggaagttattaaggtaaatggtatttttaaaattttataaaagaagtaaaagtgtttggtaattttatatttttgaattgaattaggtaaagaaggaattatagatataaagttatagttttttatttatttatttttttttttggagatagggttttataattttgtttaggagatttgaatttataattttttagttttagttttttaaatagttgggattataggtgtatagtattgtatttagttaaatttatattgtttaaatagttttttttgaatttgtgtgtgtgtgtgtgtgtgtgtgtgtgtgtgtgtgaaaaatcgtagttttaaattgttttatgggtagttattagagtaatagattttagattttattaaaatagttaaatgtatataaaatgtttatattatatataaatgtttttgaattataaaagtattattggggttttagaggaaaatgaaaatataagttttagaaatttgaaaaatgaaaaataggggtgaaagataatgagaagtatagttatatttaaagttaggttatttgggaattttgtttattggatgttataaggtcgattatagttttaattttgttttttttttttttttttttaatttttgattttattttttatgataatttatattgtttttaatttgtaaaggtatggaaaggtagttttattattttataaaagtttatatatttttatataaacgtgtttttcgttatgtggaagtgggagaaattttaggattaatttttataatttaagaaaatgaatagattaaatatttttattatttatgattttttgaggaagtttagagtaaaggtgataaattagtttgggtttagttagtaaaaagaaattatataataatttgaataaggaaagttaattataaataattattgttgttgttgttatttttttttttagagagagggttttattttgttgtttaggttggaatgtaatggtataattatggttttaagtagttttaattttttgggtttaacgatttttttatattagttttcgtagtaggtgggatatatattatttttagataatttcgtgttttttgtagaataggggttttgttatgttgtttaggtttgttttaaatttttagttttaagtaatttttttaagttttgcggtttcgtaaagtgttgggattataggtataagttattatgtttagttaagaattatttattgtaataggattggagtaataaggtgttggttagtaagaagtatagagaattttataaaatataggaataggagatataaggaggagttattgtttttagggttgaggtgggtgttttaaggaaaaatatttatttttttttagaaatgggattaagaattttttggagggagtatagttatggtttattgaatacgagagatgtttttgtgggtgttgtattagtataatttgttggaaaattatttttggtaatttgttagaaatttattttttagggcgttaggaaaagtgtttatagggaggtgttttattataggtttagttataaaatcgtttgagggggatgttgaggtatatagttgattattgggtgtagttgattatagcgtattataagagtttgtattggggaagatatatattatagaagtcggcgttgtagaagtatatatgttaaggatttagcgttggagacgtgtatacgtttgggaataggtgttggggcggtatttaagtacgggagttagcgttggggaagcggtatattttagggagttagcgttggtaaagtatatttattaagagtgagcgttagaaagtcgtatatattatgggagtttcgttttggagaagcgttacgtgtgtgtttgggaattagtgttggagaaagtatgtggaagttggcgatggagaaggcgcgcgtatgtgtgtataatttcgttttggaggagttacggttaggtgcgcgtacgataatttttatcggagaagttatacgtatgcgtgcgttggagaatttgaatttgtaattttaaatttttttataaagaaatatttacgaattgatgattttgtgagtgaattttattaaatatttgaagaaaaaaaaatattaattttttataaattttgaaaaaataggagggaatattttttaatttattttaagatgttattattacggtaatattaaagttagatagatattataagataaaatattattaatattattatgaatataatataaaaattttaaataaaatattattaagttaaatttagtaatatgtaaaaaggattatataatatgattaaatgggatttagaatgtaaggttagtataaatatataaattagttaataaattatattgataaaggaataaaattatagttattttaatagatgtagaaaagtaatatttttaatatttgtttataagaatttttaataatttagtaatagaaggaaaattttttaatttgataaagtgtatttatgaaaaatttatagttaacgtcgtatttaatggtaaaagattaaatgttttttttttaagatgagaaataagttaataatatatattttatgtttatttagtaaagtgttggagggtcgaattaggtaagaaaaaaattaattaggtaaaaaagaaattaaaggtatttatatggaaagaaaagtaaaattatattggtatgatgtcgtatgtagaaaattttgtgtaatttataaaaaattggaagtaattattaagtttaataaggaaggttgtaagatataagattaataagtgaaattaagtgtatgtttatatattgataataatttataatgaaattttaaaaataattcggttgttttatttgtggagtagttattttttatttttttgtttttttaataaatttgttttcggtcgggcgtagtgatttacgtttgtaattttagtattttgggaggtcgaggtaggcgggttacgaggttaggagtttgagattagtttgattaatatggtgaaatttcgtttttattaaaaatataaaaattagtcgggcgtggtgaagggtgtttgtagttttagttattcgggaggttgaggtagaagaatcgtttgaattcgggaggcggagattgtagtgagtcgagatcgtgttattgtattttagtttgggtaaatagagcgagattttgttttaaaaaaaaaataaaaaatttgtttttattttatcgataaaaaaaattttaatgaaattttaaaaataatttaatttataatattattaaaaataaaattttaaaattaatttataaaagggtaaaatttgtatattgaaaattattaaatattgttaagagaaattaaagcgtttaataaatggaaagagattttatgtttatgatgagatggtaatttttttttaaatagatatgtaaaattaaatgtaatttttataaagtttattatagtacggttttttgaaaaaaaataataaattgatattaaaatttatatggaaatgtaaggaattttgaatcgttaaaataattttgaaaatgaagaaaaatattggataatttatattatttaattttaaaatttattataaagttgttataattaagataatgtaatgttgatataaaaggtatgtaggttttttatttttagtttcgtattaaatttgagttagaagatgttaattttaaaatggaggtaaaattattgtttgttagtttttagtttaattttggtggttaatttgaattgttattaattttatttttttagatacggttttagtttgttgtttagtgtggagtgtagtggcgtaattatagtttattgtggtttcgattttttgaatttaggtgattttttattttagtttttcgagtaattgggattatagtttcgtattattatggtcggttaattttttaattttttgtagagatagggttttttttgttgtttacgttggattcgaatttttgggattaagtgattttttcgttttcgttttttaaagtgttgggattataggtataagttattatgttttgtttgttatttgaattgtttttttttttttatttttgtatttttattaaaatattgtaaaatttttaaggtgttttttttgtatgtatttttttatattaagttaattatttaagatttataaataagatagagaatgtatatattttagtttaaaataaaatttttaaaaattatttggtgtttatttttagttcgatttgaggttttaatattattaatttggaattattatttatgtgagttttttttggttttttttatggtttagataattaatttaattttttattggttaggttggtttttttgtagttggtttttataaatacgaaatttgtataattgttattggaattatttgttgaaatatggaattggttaaaagtattatttgttttaaaatgtatatgtatagttgtatatatatgtagtaatatattttttataattagttaattaattaagttaatgttttttattagaggataaaataaaaaatattaatatagagtttgttttttttttttgatgttttggtaaacgtttttggagaaattaagagaaaatatgatcgaataaagtaaaaataaattcgaatgtataatatataaagtataattagtttagtttttaagaagtaggttttattattgggagtagtgggttggtgaaaaagatttttgatatatttaggaaaataaattttttttcgatgtagttttttttgtatatgaataatgtatatgagtgtttatttttaggtgattttggtatagtatataatattgaaatattaatttaagtttaatgtataaagtcgtaatgaatatgttttttatttaagtttaggtaatgaatgattttaatatatggtatgaattttattgtttgtaataattttttaggggagtaaggagaaaacgatttgtttgagggtatattattgatagtgagtgatagttataaagagttgaagttgggtggtttaaaagtgttttgtttatttgataaatgttaagttaaattatattatagtttagatgtattaaatggggtataagttagaataaaattagatgttcgggagttttttaagttttagattagaataaaagtttaggtatatataggattttgttagaaaattttttggtttttttttttaagattttggtatttaattttttatgttataaaattttaagtttttttttttattcggtgcgttggatatataagattatagagggttcgtagttgtaaacgtatttatttaaaaaattaaaaagagtaaattaataaatagtatttgaaaaattttttacgggttttgaagatatggtttggcgtttataaaaagaatggagggaagatattggtttttgcgaattcgttttttttcgggaataaaaggcggagggcgggaggggtaatagtcgcgtttcgggtttttttaattggatttcgttttttttggcgtttcggcgaatggggtttgggggtaggggtgtgagggacggggaggacgaggttagttgtagagggcgatcggtttaaaggggcgagttttttacggtttttacgagttcgaggtagagaaatttatttttgttttttttttttgaagaagatatagttgtttgcgtttaatgaataaaaagaattaaaacgttaatattcggttttcgttttttcgggggttttttttcgcgcgattttagcgtcggttttcgttttcgtttttttcgttttggtttcgtttcgcgggttggtatcgttcgttatttttcgtttttcgtttttcgtttttcgttttagttttagttatagttttgcgtcggcgggaatttttttcgtttatcgtaaggcgcgtttggtttattcgttttcgcgagtttttttttttgtttttcgtttttttttttcgttttcgtcgttgacgtgtcggttagattttcgagggaagttttcgttttcgttgcgttttgcggtttgtcgtttatcgggtggttttcgcgggagttgttttagtagtttgggtagtggcggaaaggaagttatcgttcgggatttgtggtttgaaaatttggttttgtttcgtattggttttttgagtttttttggaattttttcgcggtcgttcggtagtggagtcgcgcgcgcgtatacgtgttagtagtgtattttggggtttggttagcggtttcgcgcgttttcgcggcgtcgcgggaaaatttcgacgaatttcgggttcgtggggcggggcgggcgcggttagggttttggcggaagtgggttcggttggggcgggttttaggcgagcggagtcggtattgttttagtgttttcggtttcgcgcggaagtttcggcgggagtagggttgtagtagcgttcgcggagaaggggcgttggttttttttatattttgtttaaaatgtaggggaggtaaaatggaaattagtttttttgaagaaaagttgaggttttgttaacggggtaaaatttttaaaataagattttttaattgcgttttaaataatagtaataaaaaaggtatttttagttaatgattttttttatcgtatattagttttatatagtgtttggtcggggtttaaattagtttaacgttgtatataaattatttaaataaatattaataaaattttttttaaatttttatttatgataatggtattagtttgttttggtgaattttttttttttttaggatttgacgatttaagttttaaaatgttttaaattaatgttttataattataaattataattataaaattatagtttaggtcgggcgttgtgttttaggtttgtaattttagtattttggaaggttaaggcgggcggattacgaggttagaagatcgagattattttggttaatatggtgaaacgtcgtttttattaaaaatataaaacgtttaatcgggcgcggtggcgggcgtttgtaattttagttattttggaggttgaggtagaatagtttgaattagggagttagaggttgtagtgagtcgagatcgcgttattgtattttagtttggcgatagagggagatttcgttttaaaaaaaaaaaaaaaaaagttataattttatatatacgtttaaaaatatattataggtcgggcgcggtggtttatatttttaattttagtattttgggaagttgaggcgggtggattatttgaggttaagagtttgagattagtttggttaatatggtaaaaattcgtttttattaaaaatataaaaattagtgtgtattttcggttatttaggaggttgaggtaggagaattgtttgaatttaggaggcgaaggttgtagtaagttaagatcgtattattgtattttagtttgggtaatagagcgagattttgttttaataaaaaatattataaagttgtgtgtgtttgtaataaaaatagtttttaagtatttaaatatgtttaattatttttatggtgaagaaatattcgttttattaatgaatatttttaatttagagattaatttgtagaggttatatatttataagtgatataataagtatatagtatagtaatagtaataatttgtttaagaattaaaggtagttaaaaaaaggaatcgatttagaggttgagataaaattggtagaatttgtaattatattaaggaattcggtgtttatatttattttcgaaattattttatgttagttaaggaagtcggtgttttttgattgttttttaattttagattcgggggtatatgtgtttgtttgttatataggtatattgtgtaatggtggggattgggtttttggtgtatttgttttttaaatattgaatattgtatttaatagttaattttttagtttttattttttttttattttttttttttttggagtttttagtgttttgttatttttatttttatgtatatgtatatttattgtttagttttcgtttatgagaatatgtaatatttgattttttgtttttgagtttgtttatttaggataatgttttttagttttatttatgttgttgtaaaggatatgatttcgttttgttttatagtagagaggtcgatgtgtttttgatgtgtgtatagtgtgatatggataaattaaaagtaagttttgggtagggaaatatatgtttgaggggtatttatcgtggtattttgattatgagaaagttatttttgtggtaataaatcgagagtgagttgacgtttaagttttgtatttattagtaaagaaagtaattaaagtatgtattttttgagagaaattatttattttggtatttatatttttttatatattcgttgaaaaattatttttagtgtttgttaatgattgatgttttgttatattttagttttttgtttttttagtttagtggttaataaagaattgttaggtttatttaattttgtagtatatgaaatgatattatgtttaggtttaaattagatttaaataggaagtatatatagtataaagatttaaatttatatttatagggatttattttgtttggtatttatatatatggaattattttaataatattttaagtaatagtgagatgtttattttgtaaaatgtttagaaagtttttagagaaatagatattttaatataaattttttttttaattgaattataaaattgattatgggtgatttaatttttgtttgtgtgtgggagtgtgtgtgtgtgtgtgtgtggttttgatttgtttgttttgagattgtattttatttttatttaggttgaagtgtagtggtgtaaatatagtttattgtagtttcgatttttgcgtttaagtaatttaattattttagtggtattaaaatgttggaattataggcgtgggttatcgggtttaggtgtgtgttattttggaatatagttttggttgtagtatagaatttaattataaataatgtcgtaaaatgaaaaatggtttatttaggtgaaaattattatatcgtttatattaaatttttatattttagaggaaaataagttaattggttgagtgttgtaaagtttttgatattattaaatttttttttaaagtttaataaatagaattaattgttttagaatttacgttgtggaaattattgtattaagatttttatttttagaattagtttagatattatttatttggtttttagtttttatttggtattttaatatttaatattatttttttttttttttttttttttttttgagatagagttttatttagtcgtttaggttggagtgtagtagtatgattttagtttagtttattgtaatttttgttttatcggtttaagtaatttttatgttttagttttatgagtagttgggattataggtatatgttattacgtttttaatattattttgtttatggttttgatatttgttttttgtattttagttgtgaataatgcgtgttgaagttttaggtattgggttaattttttggtttgggttattttttttgatttttatagtgattttatgtaatttatagtggtaatattttatttttatagatatagaaatttatgtatagagttattttttttagtggagggtggaatttggttttaattttatttatagtggttttttatttataatgtttttgtttttggtttaggttggtgatttgaaaatagggtgaggtgattttagaggtttttgtattttaattattatattatttttttattaaaatattttaattgaggaaatgtaagttgaattagagaagagaataatgagaatattttttgtgttagaaatattttaagaaacggagtagataatagtgaagggttttgatttgttatcgtgaaggggaaaaggttaagaaagggatggttgtaggagatggaaatttatggaaaaagggaaatgtattataaatgttgtatggaagttgttatttttattttgttttcgatatgtttattttttaggttttgttgaaagaatgtatttaggaggatatgtttgtattagagtttttattattagttatagttaattgaattagagatggtagtttgattttagttgaattaattaaattattgttggggaatttggaattgtaatattgagagattgtaatatttttatataataggagttaaagtttttatgttaattggagttatttggggaagaaaaatatgtaagtagtaaagaaagttggttggtagagaaaagtaaaatgacgttgaaaggttgttatttattttgtgagagagaggggagtttttattttttattttttatttttaagtttaattttaaggttaattgattatatattttttttgtttttagttgtttataggattgttttatatttttgtaatagttatttttttatttatgttgattttagtgagttttttttttttattgtaaagtaagttttgattaagaatttggaggtggtagttttttattgtgttattgggtattcgtattttggttgagtttatttgataaattaattaatagatatttattgcgagattattatagggaatgaaaaatggtttttttgtatttattttaggtttatggttgaggtttttataataaaagattaataggagtaaagtatagatattgtatgtaagttttttatgatataggagtttttttaaggaaaggaagatttagagaagttgttaaatttgtgtgtttttatgttaggttttatgaagagtggatagttgtggggagatatagttgaataaagatgggaataaatttggggggaatttagtaaggtttatttgtttagatttttttttgtaattcgttagtttttagaggtaagaaagtattttttttgtggagataggtattgtggatataggtagtattttttatatgagggttttaggatttgttttaggggaagtttagaaaattattttaaggttttatgattcgtattaggagaaaggagaggagggaaggtgagagtgattttttagtttttgttatgtttttaaatattaatatgttgtatttagtagaagtatgtttttaatttaattattataaagtataaagtataaagtttatacgttgtgtgaaagatatagatttaagtattttagagttgagag

SEQ ID NO: 2099 - DNA, 2814 bp, Artificial Sequence
  chemically treated genomic DNA (Homo sapiens)
ttttagatggagtttgtttttgtttttaggttggagcgtagtggtgcgattttggtttattgtaatttttgttttttaggtttaagcgatttttttattttagtttttttagtagttgggattataggtacgcgttattatatttggttaatttttgtattttaagtagagatggggttttattatgttggttaggttggtttcgaatttttgattttaggtgatttatttattttggttttttaaagtgttgggattataggtgtgagttattgtgtttagtttattgtaggtttttatagagaaaaggggtaggagttaggcgcgtaggtagtttttggaagttagaaaatataaggaaatagatttttttttatagtttttagaagggaatgtattttgttaatattttgtttttagtttagtaagatttgtgtgggttatcgaatttatagaattgaaggataatatatttgtgggtgtgtgtttttaaagatattaagttttggtaatttgttatagtagtaattggaaattaagatatgtaataagttttattgtttatttttattattattattgggttgttggttatggtggaattatattttttttttttattaggttgtgtgaattttttgaggttgtgtaatacgtttgtttgatttattattggttagtaggttttgagaagaatggttggtatataggcggagtttaataaaagtttttattgaattttatttaatttatatgtggatgaagattttcgtttcgcgcgtttttttcgtaagttttattgaggttcgatttattttgttcggtttttagttttcgcgggtttttttatttcggggttgatcgggtgatttaggtagttttatattttgttggggtggtgggtttcgagcgcgggttttaggacgtagtggggcgtagtgtttgcggtaggcggtaggaggcgagcgtggtttaggaattttcgcgggagggtcgggacggggcggggtttgggggcggggcggtttagcgcgtaggcgcggggttaggcgtttcgcgcggttaggggcgggcggtcgtagagtagtatcggtcgtggtttcggtagtagtaagttcgaatttcgttttcgtttcgtttcggttttcgttttttcggtttttgggtttttaaatattagttttcggtagttcgttgcgtattgcgtttttttcgttattaggatgtcggtaatcgagaaggatttagttgaggacgcgttttggaagaagatttagtagaatacgtttatacgttggtgtaacgagtattttaagtgcgtgaataaacgtatcggtaatttgtagatcgatttgagcgacgggttgcggtttatcgcgttgttcgaggtgtttagttagaagcgtatgtatcgtaagtattattagcggtttatttttcgttagatgtagttcgagaatgtgttcgtggcgttcgagtttttggatcgtgagagtattaagttcgtgtttatcggtgagttttttggtcgggtttaggcgtttattgtggtgtcgattcgttttcgcgcgtgtatttttgcggagggcgaggatttttcgtagcgcgtttttatttcggagataagggggagtcgtttttaggggtgggttatagggggtttagatttttttttcggtgtttttttttgggatgggatttgttgtgatcgtttttcgttattcgttttagtagtgtatttttggttggttaagggttgagggtttgggttggggttataggaggagaggtggagttgttgtatttttttatatttggggcgtttttatgggagttaggggattagaaattttcgttcgttgttttcgggggcgggttttagggttagatgtttcgcggagtgttttttttgttgcgtttaggttggtgtttttagaggtagttgaatgggcgttggttcggaggttcgggtcgtgagatttgaggaggaatcgttttttgcgtttggggtttttttgtttaggtggagatagagatttggtatttttttttgtcgtcgttggaatgggtgtgggtttcgaggttgtaagggtaggcgcgggtgtgtgttttcgttttttttgtttttagtttagttttggtcgcgcgtcgtaggttgaatttattttttgttgtcgaagttataatttagagatggtggtggtaatagtaattgttgttttgtagggagtttaattagcgtttattgtgtatcgttagttttttaagttattttcgtttttacgtattttgttatttggggtgaggttagatttattttatagataagggggttcggagggttaattgatttgtttaaggttagtaagtagggtttagttgagaattgaaggaagtgggtaatagttagaaggaggttttgtttttttttttttttttaaatttatattagggtttttttgaaaggagggagggaattggtgttttttgttggattgggttttttggtttggggaggaagaataaggatgaagttttttttgtggtttgagatagttggaggttttttagagggttataaggttattgatagtgtgggttgtgatggtaggggttgtgatgtgtgtgtgtatgtgggcgtttgtgtagagaacgtgtgtatatatatagtatgtgtgtatagtatgtgtatatgtaaagagtttgtatgtatacggaatgtatgtagagaatgtgtatttatttatacgtgtgtatgggtgtgtgtatgtgtgtgtgtgtatgtgggtgggtgggtgtgggttggggtagagg

SEQ ID NO: 2100 - DNA, 2814 bp, Artificial Sequence
  chemically treated genomic DNA (Homo sapiens)
tttttgttttaatttatatttatttatttatatatatatatatatatatatatatttatatatacgtgtaggtggatatatattttttgtatatatttcgtgtatatgtaaattttttgtatatgtatatgttatatatatatgttatgtgtgtatatacgttttttgtataaacgtttatatgtatatatatattatagtttttattattatagtttatattattagtagttttgtggttttttgggaagtttttaattattttagattataagggagattttatttttattttttttttttagattagaaggtttagtttagtaagagatattaattttttttttttttttaggaagattttggtgtaggtttgggagaggagaggaaaataaagtttttttttaattgttgtttattttttttagtttttagttgggttttatttgttgattttggataggttaattaatttttcggatttttttatttgtaaaatgggtttagttttattttagatggtaggatgcgtagggacggagataatttagaaggttgacggtatatagtggacgttagttgggttttttataagatagtaattattgttattattattatttttaaattataatttcggtagtaaggagtgggtttaatttgcggcgcgcggttagagttgagttgggagtagagagagcgaggatatatattcgcgtttatttttgtaatttcggggtttatatttattttagcgacggtaggggaaggtattaggtttttgtttttatttgggtagggaggttttaggcgtagagaacggtttttttttaggttttacggttcgggttttcgagttaacgtttatttagttgtttttgagagtattaatttgggcgtagtagggagagtatttcgcggagtatttgattttagggttcgttttcggggatagcgaacgagggtttttagttttttagtttttataggggcgttttaggtgtagagaaatgtaataattttatttttttttttgtgattttagtttaaatttttaatttttagttagttaaaggtgtattgttggggcggatggcggggagcgattataataggttttattttaggggaagatatcggggagggggtttaggttttttataatttatttttggggacgatttttttttattttcgaggtgggggcgcgttgcgggaaattttcgtttttcgtaggggtgtacgcgcgggggcgggtcggtattatagtgggcgtttgggttcggttagagaatttatcgatggatacgagtttgatgtttttacggtttaggaattcgagcgttacggatatattttcgagttgtatttggcgaaaggtgggtcgttgatggtatttgcggtatatgcgtttttggttgagtatttcgagtagcgcgatgagtcgtagttcgtcgtttaggtcggtttgtaggttgtcgatgcgtttgtttacgtatttgaggtgttcgttgtattagcgtgtgaacgtgttttgttggatttttttttaaggcgcgtttttagttagatttttttcggttatcggtattttggtggcggggagagcgtaatgcgtaacgagttgtcggggattggtgtttggaggtttaagggtcgaaggagcgagaatcgaagcggagcgggagcggggttcgaatttgttgttatcggagttacggtcggtgttgttttgcggtcgttcgtttttggtcgcgcgaggcgtttggtttcgcgtttgcgcgttgagtcgtttcgtttttaagtttcgtttcgtttcgattttttcgcgggagtttttgggttacgttcgttttttgtcgtttgtcgtaggtattgcgttttattgcgttttgggattcgcgttcgaagtttattattttagtaggatgtagggttgtttgaattattcggttagtttcggggtggggggattcgcgggggttgggagtcggatagaatgggtcgggttttagtgggatttgcgggaggggcgcgcggggcggaggtttttatttatatatagattgaataaaatttagtaagggtttttattgagtttcgtttgtgtattagttattttttttagagtttgttaattagtagtaaattagataaacgtattgtataattttaaggagtttatatagtttaatggaagagaaaagtgtaattttattataattaatagtttagtagtggtggtaaaaatgaataataaggtttgttgtatgttttagtttttagttattgttgtaataagttattaaaatttagtgtttttgaaaatatatatttataaatgtattattttttagttttgtaggttcgatggtttatataaattttgttgagttaaaaataaagtgttggtaggatgtatttttttttggaggttgtagggaagaatttgtttttttgtgttttttaatttttagaagttgtttgcgcgtttgatttttgttttttttttttgtgaaagtttgtaatgggttgggtataatggtttatatttgtaattttagtattttgggaggttaaggtgggtggattatttgaggttaggagttcgagattagtttggttaatatggtaaaattttatttttatttaaaatataaaaattagttaggtgtggtggcgcgtatttgtaattttagttattgggaaggttgagataggagaatcgtttgaatttgggaggtagaggttatagtgagttaagatcgtattattgcgttttagtttgaagatagagataaattttatttgaag

SEQ ID NO: 2101 - DNA, 6050 bp, Artificial Sequence
  chemically treated genomic DNA (Homo sapiens)
tatttttttttgttaaaaagttaagagttgtttagaaggaaaaaatagttttttttaaagaggttaaatttttagtattaattagttgtagtagtggtatgtgtgtgtgtgtggggggggggtggtatggtaattttgtgtttttagtgttttaaataggggtaatttttttgtttacggtttgagttatcgaatgagtaatttcgattttttaagattttttattgggtttacgtgtgtgtgagttttataggaattgtggaatgttttttttttttgttgggtttagatatttagaatgaataaattaaagggtagtggtaatatggttattgttattgtagataatgtggtatttatatatgggtattagttgttttttttatggggtttaggaataagggtaagtttgattttttattatgaattattggggtgttttttatatatagaggttgtattagttgaaaatagtttaaatattttgtaattttgttttttttaatttttgtttatttatattttagaataaaagagtttgtttagtttttttaaagatttaaagaatattatttatttgttttttaagtatttaaaaagtataatcgtttatatttattttggttggatgaggatatgtatttatttatttatttaagagatatttattgttagatttggtggtttacgtttgtaatttcggtattttgggaggtagaggtgggaggattatttgaggttaggagtttaaggttagtttgggtaatatagcgagattttatttttataaaaaataaaaaattagttgggtatggtggtatgtgtttgtggttttagttatttgggaggttgaggtaggggtattgagtttaggagtttaaggttgtagtgagttataattatattattgtattttagtttgggtaatagagtgagattttgttttaaaaaaaagaaagaaaaagaaaaagaaaaggggtatttattgaatatttattatgttttaggtattgtgttagattttaagtgaatattagtatatgaataagataaaggcgaaaagttattaaataagtttaagttgatttcggtatatgtatttttttgatttttggtttcgtgttttgattataattttttattattagattagatttttttaaataaataattatttttgtatgttggggatgggttgtgtgcggtagtatttacgtaggcggtatagatagtagttttttatttaatgttgtaataatattaggttaaataatgtgtattgattttaaaagtgtggggttaggttttttttaagtgttatagggagagtgtaaagtaggaaaagtttatcggatgaggaaatattgtagagggaaagtgaatttttttttaatttgggttaaaatttagatgtggaattttatttttttttttatttttggatttttagataggaggaatttagtatatagataattatgaattatatatattttggttttatatgtttagatttgtttagagtatgaaatttttgttttgttggaaggtagcgtcgtgtttacggaggtatataagtatttgttttaaagttattttgatttgtagatttgtaaatggtaaaaataattttatatgtttgttttgatttgtttttatttttaggttattttgtgtgagttttattttttagaatgtgattttgtagttttgaaatggatattatgagtagattgagatgtgagaatatgttagaatgattataggttcggatgttagtggggtaggagagggagtttgagattgtattggtttatattgtggtttttggttgagtatttggtttgtttggatgatgttttggttttatttaatttttattattttattatttagaggatagaggatttgagttttatttttgtattgtagttattttttttgggatttgtttttaagtttttttttgtgttgtttggtattttttttttattttttttaaattatttattgttattttgtaagttcgattgatttgttggtttttttatgagattggaatttttttgagggtcgggataggtttattttttttattatagtgagtattagtttttagtttagttaatagttttgttaaataaataattgaataaaattatttgttaaataatggtttgttttttttagaggatggatttagtttgttttttttagaggatggatttagtaagtttttaattttggttataatggtgttagaaggaaagagttaagttatttggaggaaataggtttatttaaagatttttttttttttttttttttttaattggtaaaggtaggataagtgtatttgagataaattttggatataaaattttgatatattttttaggtattggtcgagatgttttggatttgaaagggaagtaaattaaattattttaggtttttttttttttttttttggagatagaattttgttttgttgtttaggttggagtgcggtggtacgatttcggtttataggaatttttgtttttcgggtttaagtaatttttttgttttagttttttgagtagttgggattataggcgtgcgttattatattcggttgttttgtatttttagtagggatagagttttattatgatggttaagttggtttcgaatttttggttttaagtgatttattcgtttcgggtttttaaagtgtaggaattataggagtgagttatcgtatttagttaggttttttgttaagtggtttgagatttagttgtgaatggtagttatggttagatttaggaatttaaagtttgatttattttgtttgaagttaatattaataataagagagatgtatttggttttataatttttttttttttcgtttttttttttttttttgtaattaaggatagaattagaagtatcgaaggtcgtagaattgttttaggatttagagtagttttaaggaatttgtgtttacgtattatgtgtgttttttcgtttttttttttttttatgagtgagaaaaaaaagcgtttaaatttttattaatataaattaatgatatataatgatgaaattttgtttttatttttgtttgtgatagggaatgtaaaaatagtaagtggtttagttttacgaattttcgttttttgtttttttcgtttttgtcgggttggatttttaagaatggaggttagcgtatagtttcgcgcgggtcgtttagttttcggattcggcggatgatgttaggcgacgggagcggtcgcggtcgggtcggggaggtcgcggtttaggggagttgggagggagggtggtttcgttaggtcgacggcgcgttcggtcgcgcggcgttgtttggagacggttttggcggcgttgtgttgttgtaaatagtcgtttttttgttattatttatagtaggattttttggttttcgggcgcggcggttggaggtaggtttgcggttcggtttttcgcgcgtttcgaattattcgttcgtcggttttattttgtttcgtttttttttaggtgtttatcgcgggtttcgattttcgggttcgaagagtggagaagggaagatcggggttgtgcggggatatgcgttttcgcgttttggaggtggttagcgcgttggggttgagtttcggtagcgtgatttcggttgttttacgtagtagggtaggagattggggggcgtggtatattttggagtattttgtttttttaaagtttcgtgttttaggacgtggagtcgtttttggggttttagtagtcgaggtatttcgtttaggcgtagttggatattgtttttttagttttcgttttttattttttaagttcgcgttggaaaattattcgttgcgggttttcgtaagtatagttttttggcgggatcgaattagtttttagcgtagatttgagtttttcgtaggaagtatatttcgttttgttatttcgaattgattattttgtttatataattatatttcgtattttttatttttggggtttagtttagaatcgggtagatattttttttaaatgttttcgtacgtaggttttgtatagtgtttatttgttggtgttttagggatttgatagtttttttaatatttttatatatggtcgagaaaaataaataaataaatgcgttgttttttttaaaaaaataaataaataaagtatttagtatcgtaaagtaggttatcgtatttttttattttggattttttattttttgtttttaaacgtaggaatagtgttagtattgttcgagttcgagggttggaggttaggggatgaaggtttgtttttacgttttgtattgaattagggttagaattggggatgggggtaggggcgtattttttcgggagtcgaggtttaagttttcggggttttgtattcgatgtcgttttttttatttttgagttttagaattgtttttagttttcgtataagggtaaaaaggcgttttttgttttatttttttcgatttcgggaataagggttcgtattgaattaggtgcgaatgtttttttttattttgcgtcgttttcgtttttttttttttagtcgcggttttcgttttttttcgtattgtattttcggtgttggttgtagttcgcgagtagttttcgttaatttttttttttttatataggatgtttatattaggatatttgcgttagtaggtttttacggtttttttttgtagttttggggggagttattttcgaaattttttattttggggggtttacgagatttttgagataggaattgcgaaatgtttacgagattaggatacgcgttaaggcgggggtagggagttgcgagcgttggggacgtagtcgggcggtcgtagaagcgtttaggttcgcgcgttatttttttggcgttatcgtggttgagttcgtgacgtttatatttatttataaaacgtttgttataaaagtagtggttgcggcgtttcgtattttaatcgtatttgtagcgagtatttgagaagttaagattgagtcggcggtcgcggcgtagcgaacgagtagtgatcgtgtttttatttagttttgttttatagcgtttatttgttttcgtttttcggtttttcgttcggttttgtttaatcgttacgatgatgttttcgggttttaacgtagattacgaggcgttattttttcgttgtagtagcgcgttttcggtcggggatagttttttttattattatttattcgtagattttttttttagtatgggttcgtttgttaacgcgtaggtaaggttggtttttcgtcgtcgcggggtcgggggtttggggtcgcggaggaggagatatcgggcgggacgttttagtagatgagtagggggtttttttgtgtttggagggaggttgtcgtggtcggagcggtgtcggttcgggggttcgggatttgttttgagcgtacgtacgtttgttatagtaagaattggtttttttttcgggaggtaggttcgttttgagtaatttttggtttgtattttaggacggatttttgatattagttggagtagacgtgttttaagtataaattcgttaattagagtttggttttttcggggaggtggtagaaagcggtaattttttttttttcggtagtttggagtacggaggagggatgagggaggagggtgtagcgggcgggtgtgtaaggtagttttattgataaaaagcgagtttattttggagatttcggagcggcgtttgcgttagcgtagacgttagggatatttataataaatttttttttaagtaagtgatgttgaagggataacgggaacgtagcggtaggatggaagagataggtattgcgttgcggaatgtttgggaggaaaagggggagattttttatttaggatgagggatatttaagatgaaatgttcgtggtaggatcgtttttttttattgttgtatgcggtattgggaattcgttttatttgtgttcggaatttgttcgtttacgtcggttttttttttttgttttgttttagg

SEQ ID NO: 2102 - DNA, 6050 bp, Artificial Sequence
  chemically treated genomic DNA (Homo sapiens)
tttagaataaaatagaaggggaaagtcgacgtgagcgagtaggtttcggatataggtggggcgagtttttagtgtcgtatgtagtagtgaagagaaacgattttgttacggatattttattttaaatgttttttattttggatgaaaggttttttttttttttttttaggtatttcgtagcgtagtgtttgttttttttattttgtcgttgcgttttcgttatttttttagtattatttgtttgaaagggggtttgttataaatatttttgacgtttgcgttgacgtaggcgtcgtttcggagtttttagaatgaattcgttttttattaatgaaattgttttatatattcgttcgttgtattttttttttttatttttttttcgtgttttaggttgtcgggggaggggggattgtcgttttttgttattttttcggagaagttaggttttagttagcgagtttgtgtttgggatacgtttgttttagttaatgttagagattcgttttggagtgtagattagaggttgtttagaacgaatttgtttttcgaagggggaattaatttttattatggtaagcgtgcgtgcgtttagagtaagtttcgagttttcgagtcggtatcgtttcggttacggtagtttttttttaggtataagggagttttttatttatttattggagcgtttcgttcggtgttttttttttcgcgattttaagttttcggtttcgcggcgacgggaagttagttttatttgcgcgttgataggcgagtttatgttggagaaggagtttgcgggtgagtggtagtaagagaggttattttcggtcggggacgcgttgttgtagcgggaggatgacgtttcgtagtttgcgttgaagttcgagaatattatcgtggcggttaggtaaagtcgggcgaggggtcgaggggcggagataggtgggcgttgtggagtagagttgggtaggagtacggttattgttcgttcgttgcgtcgcggtcgtcggtttagttttggttttttagatgttcgttgtagatgcggttggagtacgaggcgtcgtagttattgtttttataataagcgttttatgaatgagtgtaaacgttacgggtttaattacggtggcgttagaggggtggcgcgcgggtttgggcgtttttgcggtcgttcggttgcgtttttagcgttcgtagttttttgttttcgttttggcgcgtgttttaatttcgtgagtatttcgtagtttttgttttagaggtttcgtgggttttttaagatgaggggtttcggggatggttttttttagggttatagggaaaggtcgtggaaatttgttgacgtagatgttttaatatggatattttgtgtaaggggggagggattgacgggaattgttcgcgggttgtagttaatatcgagggtgtagtgcggggggaggcgggggtcgcggttgggggaggggaggcgggaacggcgtagaatgagagagaatattcgtatttggtttaatgcggatttttgttttcgaggtcgggggggatggggtagagagcgtttttttatttttgtacggaaattgaagatagttttgaggtttagagataggagaaacggtatcgagtataggatttcgaggatttaagtttcggttttcgaaggaatgcgtttttatttttatttttaattttagttttaatttagtgtaaagcgtggaagtagatttttattttttaatttttagttttcgggttcgagtaatattagtattgtttttgcgtttggaagtagaaagtggaggatttaaaataagagaatacgataatttattttacgatattgggtattttatttatttatttttttaaagaagatagcgtatttatttatttatttttttcggttatgtgtgggaatattaaggaaattgttaaatttttgagatattagtagataaatattgtgtaaaatttacgtgcgaagatatttgaagggggtgtttgttcggttttgagttgggttttaggggtagggagtgcgaggtgtggttatgtgggtagggtggttagttcgggatgataaggcggggtgtgttttttgcggggaatttaaatttgcgttgagggttggttcggtttcgttaggaagttgtgtttacgggagttcgtagcgggtgattttttagcgcggatttggagggtggaggacgggggttggaaggatagtgtttagttgcgtttgggcggaatatttcgattgttgggattttaggagcggttttacgttttggaatacggggttttggggaggtaaggtgttttagagtgtgttacgttttttaattttttgttttgttgcgtaggatagtcggggttacgttgtcggggtttagttttagcgcgttggttatttttagggcgcgaagacgtatgttttcgtatagtttcggtttttttttttttatttttcgggttcgggggtcggggttcgcggtgggtatttggagaggggcgaggtaggatgaggtcggcgggcggatagttcggggcgcgcggggagtcggatcgtagatttgtttttagtcgtcgcgttcgggagttaggagattttgttatagatagtaatagggaagcggttgtttatagtaatatagcgtcgttagggtcgtttttaggtaacgtcgcgcggtcgggcgcgtcgtcggtttggcgaggttatttttttttttagtttttttgggtcgcggttttttcggttcggtcgcggtcgttttcgtcgtttgatattattcgtcgggttcgggggttgagcggttcgcgcgaggttgtgcgttaatttttatttttagagatttaattcggtaggagcggggagggtaggaggcggggattcgtggaattgggttatttgttatttttgtattttttgttataggtagaggtgaaaatagaattttattattgtatgttattggtttatgttggtgggaatttaggcgttttttttttttatttataaaaagggagggaaacggaaaaatatatataatacgtaaatatagattttttggagttgttttgaattttaaagtaattttgcggttttcggtatttttaattttatttttgattatagaaagaaagagggggacgggagggaaaggggttatgaagttaaatatattttttttattattaatattagttttagataaaataggttaagttttgaatttttgagtttggttatgattgttatttataattagattttaggttatttaataggaaatttgattgggtgcggtggtttatttttgtaatttttgtattttgggagttcgaggcgggtggattatttgaggttaggagttcgagattagtttggttattatggtgaaattttgtttttgttaaaaatataaaatagtcgggtgtggtggcgtacgtttgtagttttagttatttaggaggttgaggtaggagaattgtttgaattcgggaggtagaggtttttgtgagtcgagatcgtgttatcgtattttagtttgggtaatagagtaagattttgtttttaaaagaaaagaaaagaaaatttagaatgatttgatttattttttttttaggtttaaagtatttcggttaatatttaaaagatgtgttaagattttatatttaggatttattttaaatatatttattttgtttttgttaattaaaaaaaaaaaaaagaagaagggtttttgagtgagtttattttttttagatagtttaattttttttttttggtattattatgattagagttggagatttattaaatttattttttggaaaggataaattaagtttattttttggaaaggataaattattatttaataaataattttgtttaattatttatttaataaaattattgattgggttggaggttggtgtttattgtaatgaagagggtaggtttgtttcgatttttagagagattttagttttataggaagattaataagttaatcgagtttatagggtagtagtaagtggtttgaaagaggtaagaaaggggtgttaggtaatatagaagaaggtttggaaataggttttagaggaggtgattgtaatatagagatggggtttagattttttgttttttggataatggaatgataaagattgagtaaggttagagtattatttaggtaaattaagtgtttaattagaagttatagtataggttaatataattttagatttttttttttgttttattaatattcgaatttgtgattattttaatatatttttatattttaatttgtttatggtatttattttaggattgtaaaattatattttaaaaagtggagtttatataaggtagtttaaaaatgaagataaattagaataaatatgtgaaattatttttgttatttgtagatttgtaggttagggtgattttgagataggtgtttgtgtgttttcgtgagtacggcgttgttttttaatagggtagggattttatgttttggataagtttgagtatataaaattaaaatgtgtgtagtttatgattatttatgtgttgagttttttttatttggggatttaaaagtgaaaaggagggtagaattttatatttgaattttaatttaaattgaaaaaaaatttattttttttttatagtgtttttttattcgatagattttttttattttgtattttttttgtggtatttgaaggagatttgattttatatttttgaagttagtgtatattgtttagtttggtgttattgtaatattaagtgaaaggttgttgtttgtatcgtttacgtaaatgttgtcgtatatagtttatttttagtatgtagaagtagttgtttatttggggaagtttggtttagtggtgaagggttgtggttaaagtacgggattagaagttaggaagatgtatatatcgaaattaatttagatttgtttggtaatttttcgtttttgttttgtttatgtgttgatatttatttaggatttagtatagtgtttgaaatatagtaggtgtttaataaatatttttttttttttttttttttttttttttttttgagatagggttttattttgttatttaggttggagtgtagtggtgtgattatagtttattgtagttttgaatttttaggtttaatgtttttattttagttttttaagtagttaggattataggtatatattattatgtttagttaattttttattttttgtagagatggggtttcgttatgttgtttaggttagttttaagtttttggttttaagtgatttttttatttttgttttttaaagtgtcgagattataggcgtgagttattaggtttggtaataaatattttttgaatggatgaatgaatgtatgtttttatttagttaaggtgaatgtagacggttgtgttttttgggtatttagaaagtaaatagataatgttttttaaatttttggaaaggttgaataggtttttttattttgggatatgaataggtaaaaattgggaaagataaaattataagatgtttgggttatttttagttggtatagtttttgtgtataaagaatattttagtggtttatgatgaaagattaaatttatttttgtttttgagttttatgagaaagatagttagtgtttatatataaatattatattgtttgtaatgataatgattatgttattattattttttaatttatttattttaaatgtttggatttaataagagaaagaggtattttataatttttgtgggatttatatatacgtgagtttagtgaagggttttaggaggtcgaggttatttattcgatggtttagatcgtgagtaaaaagattgtttttatttagaatattggaggtataagattattatgttattttttttttatatatatatatatgttattattgtaattaattagtattagagatttagtttttttgagaaaaattgttttttttttttgaataatttttggttttttgataggagaggatg

SEQ ID NO: 2103 - DNA, 7634 bp, Artificial Sequence
  chemically treated genomic DNA (Homo sapiens)
ggagttttttattttattttttattattattatttttgagataaggttttattttgttatttaggttggaagtgtcgtggtatgattatggtttattgaagttttgttttttttaagtttaagtgatttttttattttagttttttaaatagttgagattataggtatacgttattatttttggttagtttttgtatttttagtagagatggggttttgttattgtttaggttggttttgaattttcgggtttaagtgatttgtttattttggttttttaaagtgttgggattataggtatgagatattgagtttggtaaggaatgagttttatggagaagaatttgatttatttattttatgttttgtaggtaggtgtgttatgtttgtgagtgtaggtgtgtgtgtgtgtgtgtatgtgtgtgtgtgtgtgtttttagggttaattttttttttaggtttaggggtatagtgtttagggtttatgataaatttaatcgatttacggatatgggttaggagggtatatatgtataaagtttaggaagattttgttttagtaataaaacgagtatgtataatttgttaggagttttatgatatttttttattagttttatgagtgggtattatattttgtttttttttgtcgggtagggaaattgaggtttcggatgttttagtttaagtttattaagttatttggtgatagaagcggaatataagtttaggttatttagtttttgggtttgcgatcgtgtgaggataaatgtttagtgtgttcgtgaatatgagtatttttgtgtgaataaattgatatatataaatttatttaataaattttaaagttaggcgtcgtggtttatttttgtaattttagcgttttgggaggttgaggtgggaggatcgtttgaagttaggagtttgagattagtttgtaataaagtgagattttgattttaaaaatatttttttgaataaaaaaattaggttggatatagtggtttacgtttgtaattttagtattttgggaggttaaggtgggtggattatttgaggttaggagtttgagattagtttggttaatagggtgaaattttttttttattaaaaatagaaaaattagttaggcgtggtggtatatgtttgtaattttatttattggggaggttgaggtcggaaaattgtttgaatttgggaggtagaggttgtagtgagttaagattatgttattgtattttagtttgggcgaagaaacgagattttgttttaaaaaaaaaaaaaaaaaattagttaagtatggtggtacgtatttgtagttgttagttatttgggaggttgaagtaggaggattatttgaggttaggagttcgaggttatagtgaattatgattgtattattgtattttagtttggatgatagagtaagattttattttaaaataatattaatagtttaaggaatagattttgaagtttgatattttgtatggtgttattttagttttgttatttatttgttgtgtgattttgggtgaataatttaatttttttgggtttttgtttttttttttgtaaaatgattatttgtattttataggagtgttgtgagaattaaataagttaatataagtttttgggaagaattagtttttgttatggttgtgtgaagagttttatacgagtttttttgtaggatgtatggttgttggtttgtgtgtgtgtatatatatatatgtgtgtgtgtatgtgtgtatttatgtgtatatgtgtatatgtgtgtgttgtttttttgatttttgagtgttgtgtgtgtgttaatgtgtgagattatatatgtatttttagtaaagatttaggggtttttgtgtgttttgggggtttgtatttgtttttggttgtatatttgaattttacgtttttttgtgtgtgtagggatgtgtgttatgtgtgttgataattatatgatagtgtgtgtttttatatgttagtgtgtgtttgtgaagttgtttttatgtggttgtgggtgattgtttacgcgtgatttggtgagcggttgtgtggaagtttgtgttgtttgtgtcgggtgtggagtttttggttagttagggtaggtttttgtatgttttttttattttatggaggaggagatgaggggtttggatgagatagaagaatgaggggttattttttgtttgatgttggggtcgagttattgtttattagtggttgttgtgttattttttagtttttgttttttttttttggttggtggtagatagagggggcgtggaggaatagggtagggggtgggtttgaggttggatttttgtttggaaatttgaatttttatttatgttttttacgtttttttagttttttatatttttttatattttttttattattggggtagggaattaggattttttgaaaattaagaattatcgttttggttttgttataggtttgttgtgtagttcggagataggttttgttttttttttaatttgtgaaatttaatgttttaaaagtgtttttttttttgtgtttagggttgggttaggttgtgtattgggagggaagtgttgggttttttgaggtttgtgaaatagttggtagtattttttttagtgggtgtttaagagttgggggttgtagtatttgaaatatttaagttagtgtaggtatagtggtttatgtttgtaattttagtattttgggagatcgaggtaggcggattatttgaggttgggagttcgaaattagtttggttaatatggtgaaatttttatttttattaaaaatataaaagttaggtcgggtatagtggtttacgtttgtaattttagtatttaagaaggttaaggcgggaggattatttgagtttgggagtttgagagtagtttgattaatatggagaaattttgtttttattaaaaatataaaaaaattagttaggtatggtggtatatgtttgtaattttagttattcgggaggttgaggtaggagaagtattttaattcgggaggcggaggttgcggtgagtcgagatcgtgttattgtattttagtttgggtaataagagtaaaattttgttttaaaaaataaaatagaataaaataaaaattagttaggtgtggtggcgtatatttgtaattttagttattcgggaggttgaggtaggagaattatttgaatttaggagatgtaggttgtagtgagtcgagattgtggtattgtattttagtttgggtaatagagtgagattttgttaaaaaaaaaaaaaaaaaacgttagatttatgaattttatttgttaagaagatttgtttaggtagttatttgtatttttgtgagttaagattgtaatagtatatgttaagagtagtaagaaggagattgtaaagtttagaaagatttgataggttaggcgttgtggtttacgtttgtaatttcgatatttcgggaggtcgaggtaggcggattattaggttaggagtttaagattattttgattaatatggtgaaatttcgtttgtattaaatatataaaaattagtttgacgtggtggttcgcgtttgtagtttagtaattcgagaggttaaggtgaggcggaggttgtagtgagtcgagatcgttattgtattttagtttggcggtagagtaagatttcgttttaaaaaaaaaaaaaaaaaaaaaaaaaaaaagatttgataagtgaaagttattaatattgttattattatttaaaaaaattttagatataggttttttagggagttttatttaattaggtaggttttagaaattagaaaagaaatggaaagggtaggaaatttggagtttgataattttgagtttgaattttttgtgatgggattttgggtaagttatttaatttttttgagtattattttttttttttataaaatgaagattttttttttttaattttttagagttgttttaaggattataaattttttattgaaaggcgtagtataggagttgtgtttggtaagtgttaaatataaggtattaattattattattagaattaataataatatttttttttttttatatattttttgttttcgggtggattaaaaggtggaaggagaggttattaatattattagaagagaggtttttttttaagttttattttttattttttttaaattcgtattttttttaaacgtcggatttgtaaggttagtagggtttaagatatatattttttgtttagcggggaagattaaagttaaagtttagagagggaaaatattttttaagttcgtatagcgaattaggatagaaattaggacgagtttcggaatttttttattatttttatttttatttgagtattatagttcgttcgggatttagtttttttatttacgtgattatattatattaattagggtttttttttggagatttgttttttttttcgaatgggggcgttgtattatcggtagaatagggtaggtgggggcgttagaggtgaaggggatttgtaggttggggtttttttcgttcgggttagcggggtttttgcggggttagtttaagcgtttattattattagttttcggggcggcgttgtattgcgtaggcgcgggcggggcgcgggcgcgcgcgcgagcgagcgagggattttttttgacgttattgttaggatattaaataaatatttcgtcgcgtcggtcgagttttttatatggttaattgcgttataggaatttcgggaaggcggggtcgggattttttttcgtcgagtggttcggaacgtaattttcgagatttttagggtttcgagggttatgtaagtgattagatcgagtttagaatagattttttgttggatagtgcgggattcgatttggcggggtcggagatttggggaagtttgtttagtaaggggcgggtgacgtaagtaggggggcgggtttcgggtatataaatataggttggcgggtttgtgttttatttataagatttagagttacggttacggtagggatacgcggaattaagatttggaaatttgattgttgtggttttttttgggggttatgaaattttattaattttttttttttcggggagaaagtttttggaaagatttttttagatatttttttatttttttttggaggatcgatttattttttttggttttttttattattttttttttttcgtgggattcgtcggacgcgtggaggagatcgtagttgaagttgattttgtatagcgggatagcgttttttgtttttgggggagtaatttttttttcgtttttgggttttacggagtttgtatttttaagaggtatagcggtattttgtgggggtttgggtatcgtaggaagattgtatagaaattttgttattgttggaacgggacgttgtttttttttcgagttttttcggatagcgtattttgaggattcgtttagtttatcggggatttttacggtttatttcggatttgtattttatttttttaattcggttatagttttggtttttcggcgattttagcgtggttataggggtttttttgtgtttagggaaatgttttaggtttttttcggagattacgatttcggttttcggtgtagttttttattttttgtcgagttttaatatttgttttcggtggattttttcggtagtttatttatcgtcgtcgttttttaggtaagtttttgatagtaggggtgttgttttgtaggttttattttttaagttaagggtgaaaagaataaattttaatttttataaaaaggcgtattagaattttagatttgagatggaaaaggtttatagcgtattttgtaaattgtaaagagtcgggagatgtttgtaattggttgcgtgcgtggagcgtaaggagggaacgcggtagggagggtaggttttggggcgaggtgggggtggggtgggtaatgcgttgtttaatgtaacgtgtatgcggtagcggggttgagaattttgagtcggtttcgggattgttttttgttcgggttttagatttgaagttagcgtagttaggtaggtgggggaaatttcggggaagtttttagtagtttttttttttttttttttttttcggagcgtttatttcggtgtcgggtcgttttttatttatcgggaagaggggtttcgaatttttagtcgcgttgttttcgttttttgcgcggagacgtaacgggggattcgtgcgtaacggttgacgcgttggaatttttcgtttgacgcggggtacgtacggcgcgcggcgttttttcgttcgtttcgtttttgacgtttcgggagcgttttattttggaacgtcggggttacgttgttaagggagggggtagttcggcgtttcgattggtcgtcggggcgtacgttttggttaattagttttttttttttatttgtagggtgtatttttttttttttttttttgttttcggaattcgtggttttttggcggttgggttttttttcggcgtttttagaggtagagggaggggatttttgtcgtgataagagcgtttgtttgcgatttaatggatttgcgaggtttttgcggggatttagtttttgggtttttaggagaagggggtgtttgtttgtgtgttggcgttttttggagagatacggtggttgttatttttttttttaggtatatatagatatatttttattttttttgttttttatgttcggttttttcggtgtgttttaagataggattagaatcgcgaatcgaagggtaattagttaggtggtttttaggagtttcgttttttttgggtttttaggattttgattggtcggcgagttagttttttttttattacgtttttcgagagagtagttaagtttttagagtagttttaggagtttatttacgggaggggggagatgagcgttgttgaggtttgggggtttaggtttcgtattatttttttttcgcgataatttgagagagttttagtggttatttttatttatttgttcgtttattttaaattgttattcgttagttttattttgagaagagatagtaatttgaaacgttgttttaaatttttaggttcgttttttaaatatttttttgattgggattttcgtttttgtatgggatttcgcgtagaggggggtgtgtatgtgtgtgagtgtagaggaaggtttggtttaaggtttttttttttttttttttttgtttttggggtgggggtggggtgttgtggttgtgtgtgtggttgtggtttcgtttcgggggttttgttattcggttgtgtttagttttttttttattttttatatttaagagttattaattcggggtgtgatttattattcgttggaatcgtgtaattttttttcgaggaagaaggaggaggtagaagttagttgagtagaaatttttttattaattattgcgttacggtgtagtggaagggtgggtgttgtggttttttttttgtgatatatatatttatattcgtttattttgtgtttatttacggggtcggtgtgtgttatgtgtgttgggtgtgtgtgtgtcggtgtttttgtttgtgtgtttacgtttgtgtgtgtatgtgttatttcgtagg

SEQ ID NO: 2104 - DNA, 7634 bp, Artificial Sequence
  chemically treated genomic DNA (Homo sapiens)
tttacggggtgatatatatatatataggcgtagatatataaataaagatatcgatatatatatatttaatatatataatatatatcgatttcgtgagtgagtatagggtgagcgagtgtggatgtgtgtgttatagggaaaaagttataatatttatttttttattatatcgtgacgtagtggttaatgagaggatttttgtttaattggtttttattttttttttttttttcggggaaaggttgtacggttttagcgggtggtgaattatatttcgggttggtgatttttaggtatggggggtggagaggaggttggatatagtcgggtgatagaattttcgggacggagttatagttatatatatagttataatattttatttttattttagaggtaaggggagggagaaggagaggttttaggttaagtttttttttatatttatatatatatatatttttttttgcgcgaggttttatgtaggggcgggggttttagttaaaagggtgtttgggggacgggtttaggagtttagaataacgttttaagttattgtttttttttagagtgagattgacgagtgatagtttagggtgaacggataggtagataaaagtaattattggagtttttttagattgtcgcggagggggaatggtgcgggatttgagtttttaagttttagtagcgtttattttttttttttcgtaaatggatttttggaattgttttgaaggtttaattattttttcggggggcgtggtgagggaagggttggttcgtcgattaattagagttttgggaatttagagggggcggagtttttggagattatttggttggttgtttttcggttcgcggttttagttttgttttgggatatatcggaggaatcgggtatgaggagtagagggagtgggaatgtgtttgtgtgtgtttggagaagagggtgatagttatcgtatttttttaagaaacgttagtatataagtagatattttttttttttgagagtttagggattagattttcgtaagggtttcgtagatttattgggtcgtagataggcgtttttgttacgatagggattttttttttttgtttttagaggcgtcgaaaagagatttagtcgttaaggaattacgggtttcggggatagagaggggggaaggaaaatgtattttataaataggaagggaaagttgattggttaaggcgtgcgtttcggcggttaatcgaaacgtcgggttgtttttttttttagtaacgtggtttcggcgttttaaaatagaacgttttcgggacgttaggggcggggcggacgaaggggcgtcgcgcgtcgtgcgtgtttcgcgttagacggaggattttagcgcgttagtcgttacgtacgggtttttcgttacgttttcgcgtaggaggcggaggtagcgcggttgagggttcgaggttttttttttcgatgggtggagggcgattcggtatcgaagtgggcgtttcgaaggaggaggaaaggaaaagagattgttggaagttttttcgggattttttttatttgtttaattgcgttagttttaggtttgggattcgagtagggggtagtttcggggtcggtttaaagtttttagtttcgttatcgtatatacgttgtattgagtagcgtattatttattttatttttatttcgttttaaagtttattttttttgtcgcgttttttttttgcgttttacgtacgtaattaattgtaaatatttttcgattttttgtagtttgtaaagtgcgttgtgagttttttttattttagatttagggttttgatgcgtttttttgtgggggttggggtttattttttttatttttgatttaaaaaataaaatttataaagtagtatttttattattaaaaatttatttgggaggcggcggcggtgggtggattgtcgaaggagtttatcgaagatagatattgagattcggtagagggtgaggagttgtatcgggagtcggagtcgtagttttcggggaaagtttgaaatatttttttgggtataggggggtttttgtgattacgttgaggtcgtcgggaagttaaggttatggtcgggttggggaagtaaggtgtaagttcggggtgagtcgtgggagttttcggtgagttgagcgagtttttaaagtacgttgttcggggaagttcggggaaggagtaacgtttcgttttaataatggtaaagtttttgtgtagtttttttgcggtgtttaggtttttataggatgtcgttgtattttttgaaagtgtaggtttcgtaggatttaggggcgagggaggggttgtttttttaggggtagaaagcgttgtttcgttgtatagaattagttttagttacggttttttttacgcgttcggcgggttttacggggggaggggagtaataaagaagattaaaaaaagtaagtcggttttttaaaagaaaatgaagaaatatttggaagaatttttttaaaaatttttttttcggaaaaaaaaagattaatgaaattttataatttttaagaagaattataataattaagtttttaagttttggtttcgcgtgtttttgtcgtggtcgtagttttgagttttatgaatgaagtatagattcgttagtttgtatttatatgttcgggattcgtttttttgtttacgttattcgttttttgttggataaatttttttaaattttcggtttcgttaaatcgagtttcgtattgtttagtaagaggtttgttttagattcgatttggttatttgtatgattttcggggttttgggggtttcgggggttgcgtttcgggttattcggcgggaggggatttcggtttcgttttttcggagtttttgtgacgtaattagttatataaggagttcggtcggcgcggcggagtgtttgtttggtattttagtaatgacgttagagggaatttttcgttcgttcgcgcgcgcgttcgcgtttcgttcgcgtttgcgtagtgtaacgtcgtttcgggggttggtaataataggcgtttagattagtttcgtagggatttcgttgattcgggcggggaagattttagtttgtaggttttttttatttttggcgtttttatttattttgttttatcgatggtgtagcgtttttattcgagaagaagagtagatttttaaaaggagattttgattagtgtggtgtggttacgtaggtggggaaattgagtttcgagcgggttgtgatgtttaggtgaaagtggaggtaatggagggatttcgaggttcgttttggtttttgttttgattcgttgtgcgagtttaggaaatgttttttttttttgagttttagttttaatttttttcgttgggtaaaggatgtgtgttttggattttgttggttttataggttcggcgtttgggagggatgcggatttggaggagatgggaaatgaaatttagagagaagttttttttttgatggtgttggtagtttttttttttattttttaatttattcggagataaagaatgtgtaagagggaggggatattattattaattttaataataataattaatgttttgtatttggtatttgttaagtatagtttttgtgttacgttttttagtagaagatttgtaatttttaaaatagttttggaaggttaagagagaaaaatttttattttataaaagaaaaaaatgatatttagggaggttaaatgatttgtttaagattttattataagaaatttaaatttagaattgttaaattttagattttttattttttttattttttttttgatttttgagatttgtttggttggatgaaattttttgaaaaatttgtgtttggggtttttttaaatgataatggtaatattagtagtttttatttgttaggtttttttttttttttttttttttttttttttgagacggagttttgttttgtcgttaggttggagtgtagtggcgatttcggtttattgtaattttcgttttattttagtttttcgagttgttggattataggcgcgggttattacgttaagttaatttttatatgtttagtatagacggggttttattatattggttaggatggttttgaatttttgatttggtgattcgtttgtttcggtttttcgaagtgtcgagattataggcgtgagttatagcgtttggtttgttaggtttttttaagttttataattttttttttattgtttttagtatgtattgttgtaattttggtttataggggtataggtgattatttgagtaaatttttttagtaaatggggtttatgaatttgacgttttttttttttttttttgatagagttttattttgttgtttaggttggagtgtagtgttataatttcggtttattgtagtttatattttttgggtttaagtgatttttttgttttagtttttcgagtagttgggattataggtgtgcgttattatatttggttaatttttgttttgttttgttttgttttttgagatagagttttgtttttgttgtttaggttggagtgtaatggtacgatttcggtttatcgtaattttcgtttttcgggttgaagtgttttttttgttttagtttttcgagtagttgggattataggtatgtgttattatgtttggttagtttttttgtatttttagtagagatagagtttttttatattggttaggttgtttttaaatttttaaatttaggtgattttttcgttttggtttttttaaatgttgggattataggcgtaagttattgtgttcggtttaatttttgtatttttaatagagatgggggttttattatgttggttaggttggtttcgaatttttaattttaggtgattcgtttgtttcggttttttaaagtgttgggattataggtatgagttattatgtttgtattgatttgggtattttagatgttatagtttttaatttttaagtatttattgggaagggtgttattagttattttataaattttagagaatttagtattttttttttagtgtatagtttggtttagttttgggtataaaggaagaagtatttttaaaatattgaattttataggttgagagaggggtagggtttgttttcgggttatatagtaagtttgtggtagagttaaggcgatggtttttaatttttagggagttttgattttttgttttaatagtagggagggtgtagggagatgtggaagattagagggacgtggggggtataggtggaggtttaagtttttagataaaagtttagttttaagtttattttttgttttgtttttttacgttttttttgtttgttattagttaggagggagggatagagattgggagatgatatagtagttattagtaggtagtgattcggttttagtattagatagggagtgattttttatttttttgttttatttaagttttttatttttttttttatggaataaaggaaatatgtaaagatttattttggttggttagagattttatattcgatataggtaatatagatttttatatagtcgtttattaggttacgcgtgggtaattatttatagttatatagaaatagttttatagatatatattggtatgtggaaatatatattgttatatggttattaatatatatgatatatatttttatatatataagaagacgtagggtttaggtgtatagttaaggataggtatagatttttaaaatatatagagatttttagatttttattaaaggtgtatatatgattttatatattgatatatatataatatttagagattaagagagtaatatatatatatatatatatatatatagatatatatatatatatatatatatatatatatatatatatatagattaataattatgtattttgtagagggattcgtgtaaagttttttatataattataataagagttaattttttttaagagtttatattaatttatttaatttttataatatttttgtgaggtataaatgattattttataggaagggaaatagaagtttagagaggttaagttatttatttagagttatatagtaagtaagtagtaaagttggaataatattatgtagggtgttaggttttaaagtttgttttttgaattattagtattattttgagataggattttgttttgttatttaggttagagtgtagtgatgtaattatagtttattgtaatttcgaatttttggttttaagtaatttttttgttttagttttttaagtaattaataattataggtgcgtattattatgtttgattaattttttttttttttttttgagatagagtttcgttttttcgtttaggttggagtgtaatggtatgattttggtttattgtaatttttattttttagatttaagtaatttttcggttttagtttttttagtaggtgggattataggtatgtgttattacgtttggttaatttttttatttttagtagagaaagggttttattttgttgattaggttggttttaaatttttgattttaagtgatttatttattttggttttttaaagtgttgggattataggcgtgagttattgtgtttagtttaatttttttatttaaaaaaatgtttttagagttagggttttattttgttgtaggttgattttaaatttttggttttaagcgatttttttattttagttttttagagcgttgagattgtaggagtaagttacggcgtttggttttgaaatttattaaatgggtttatgtatgttaatttatttatatagggatgtttatgtttacgaatatattgggtatttatttttatacgatcgtagatttagaagttaggtggtttaggtttatgtttcgtttttattattaagtagtttggtgaatttgagttaggatattcggggttttagtttttttattcgataaaggagaataagatgtagtgtttatttatgagattggtgggaagatattataaggtttttgatagattgtatatgttcgttttgttattaaaataaagtttttttgaattttatatatgtatatttttttgatttatattcgtgggtcggttaaatttattatgggttttaggtattgtgtttttgggtttaagggagaaattggttttggagatatatatatatatatatatatatatatatatatatttgtatttatagatatgatatatttgtttgtagagtatggagtgggtaaattaagtttttttttataaggtttattttttgttaggtttagtgttttatgtttgtaattttagtattttgggaggttaaggtgggtagattatttgagttcgggagtttaagattagtttggataatggtaagattttatttttattaaaaatataaaaattagttaggggtggtggcgtgtgtttgtagttttagttatttgggaggttgaggtgagaggattatttgagtttggggagggtaaggttttagtgagttatgattatgttacggtatttttagtttgggtgataaagtgagattttgttttaaaaataataataataaaaaataaaataagaggtttt

SEQ ID NO: 2105 - DNA, 9859 bp, Artificial Sequence
  chemically treated genomic DNA (Homo sapiens)
atgaagtttatatttataatttataattgttgtataattatttaaattatagtatgtaaaataattattttattacgtttatggattatgtgggttgggaattaggataaggtatagagatgtttgtttttgttatttaaaatttaaaggtttggggggtgattagaagattgtgaattggagttatttagagtttttttatttatatgttagatgtttgggttggaatgatttaaatgttgaattaggttggtattgtattaagtgtttataggtagtttttttagtatggtggttttagaggaattaaagttttaggataatggttgtttttttttagaatacgtgttttaggagaattagaagatgttttttagttttttttgatttagttttgaaagttacgtggaagttatttttattacgttttttggttaaagtagttttaattttatttaggttttaggggagaggcgatataatatgtttgtttttttgttagtggaaggagtgtttaagaatattgtggttattttttttagaattgttgtattaaggtaattgcgtggatttgggggttgttattgagacgagagttaatgaaaagaagtagagtgtttagtttgttagagttgttataataaaatattattggttgggtggttataataatagaaatatatttttttatagttttattagttggaagtttaagattaaggtgttagtagggttgattttttttgagttttttttttttggtttgtagatatcgttttttttttatgtttttatatagttttttttttatgtttgtttgtgtttggattttttttttttataaggatattagttatattgagttggggtttattttaatgattttagttttagttaattatttttttaaaggttgtatttttaaatatagttatattttgatatgttggggtgtattggttaatttttatgttgttaataatgatatatttaagattgggtaatttataaagggaagaggtttaatggatttatagttttatgtggttggggaggtttcgtaattattgcggaaggcgaaggaagaataaagggatattttatatggtagtaggtaaaagagaatgagaattaagtgaaaggggaaattttttataaaatcgttagatttcgtgagatatatttattattatgagaatattatgggggaaatcgtttttatgaaataattattttttatttggttttttttataatacgtgggaattatgggagttataatttaagatgagattagggttgggatatagttaaattatattatggggtgagggttttaatttaagaatttgaaggggaatgtgatataatttagtttttaatagagttgtgggagaaggtgaggagagtaaaggttgtagatgagtttgaaaggaaataggaatttaaaatgatgtgtttgaatattaagggtaggtttgagttagagataggggtttggtgaatgttagttgaggtgtggtttaagttttaagtatggatgggtttatcgtagagaacgtgaaatagtagatagagaggtttatgtaattattaagatattgataatatttattgtattggaatttatgttaagtgttttgtattattgattttatttgttttgttttagaaaatatttttgtaagtattattgtttttaatttataggtgaagtgtttgggatttagtgtagttaaattaggggttaaatttagttatcgtttgtttttgtatggtttgagagttaagaatggttttaatattttttatcggttaaagaaaattaaatgaagggtattttgtgttatgtaaaatttatatgaagtttaattgtcgtgttttaaataaagttttattgatatatagttatgttttttatttataattttgtttgtggttgtttttaggttataatagtagagttaaggagttgtgatggagattttatggtttgttaaatgaaatatattgattatttggttttttataggaaatgtttgtggtttagtgtagtggtttcgttttgtaattttagtattttgggaggttaaggtaagtgattgtttgaggttaggagtttaagattagtttggttaacgtggtaaaattatatttttatttaaaaaatataaaaattagttaggcgtggtggcgggtatttgtaattttagttattggagaggttgaggtaggggaattatttgaatttaggaggtaaaattgtagtgagttaagattatattatcgtattttagtttgggtgatatagtgagattttgttttaaaaaaaaaaagttgggggaaatgtttgagatttttggattagttggtttgttcggagttagtgaatagtagttttgggattttagtttaggtaatttggttttattattttagtttagtgttttattgggaggttgtgttgttcgtcgaggttattttttatgttttagttattagaagagttagggatttttgtagtataggtaggaatatttttatttcggttaattttaagatatttttttttttagttttacgtaaatatagaagtggaagtttattttaagattttcgtttttttttttattatagttattttggaatatatatttggttttatttttgtttaatttagtgtgttaattataggttatttggtagttaggaagaaaatttatttatgttttagaaaagagggtttatgggaaataggtaggggtgttttaggattttcgttttaggaagaatagttagattttaaaagatttataaatttttttggtaattattttttgtggagttttttgttttttgtttttttttgatatttgggttttttttttttgtgtataatgatgttttttgttattttttttattttaatttttttataaagtgttggtttttatgtgatttttaggtacgtttttatttgttattttttatattttgggaattttttaaaatgtatttgttgttatgattttaagaaaatgtttataaaatataaatataaatgtttataaagtataaatgaatatattatttttttgattaaagatttttagtgattttttattttatttttatttttttggtgtgggatgttggagtgtagtagtttttaatatttttggtattagggattagttttataaaaaataatttttttatggggtggcggggtagatggttttaggatgatttaagtatattgtatttattgtagattttatttttattattattattatattgtaatatataatgaaataattatataatttataatgatgtagaattcgtgggagttttgagtttgttttttcgtaattagatagttttatttgggagtgatgggagatagtgatagattattaggtattagatttttataaggagtatataatttagatttttggtatgtatagtttatagtagggtttatattgttatgagaatttaatgtcgttattaatttgataggaggtagagtttaggtagtaatgttagtaatggggagtggttataaatatagatgaagttttttttgtttatttgttagttatttgttgtgtagtttattttttaataggttatagatcggtatcggtttgtgtattggtttatggtttggaggttggggatttttgttgtaatgtgaagttaggagttgtggtagtttttttggagttatgaagtggtaatttttaggaaaaaaagttattatattagggataaaaaagagaaaagattaaaatgaatgtagtttttgatgatattttttagatataatttaatttagtattatttttttgtaaaatttttgtaaagtaaattataaatttcgttttggttttaagttaagtttgtttagtttatggtttaagatggttttgaatgtagtttaatataaatttataaatttttttaaaatattattagatttttgggggatttttttttttttttttttttttagtttattaggtatcgttagtgttagtgtattttatgtgtggtttaagataatttttttttttttagtgtggtttagggaaggtaaaagattggatattttttgttgaagttattgttaggtgtaattgtaaattataaattatttagaattaaaaatagttcggtttatgtttgtaattttagtatttggggaggttgaggtaggaggattattaaatttaggggtttgagatatgtttgggtaacgtagtaggatattgtttttaaaagaaaagaaaaaatagttttaatgtaataatgttttggtaataatgtttttagaattagtgtcgttatttttgattttgtaattgttttattatatttttttatattattttgatatttttggaaggatgtttaatattttagaaaaacggttatttttttgggttagaagattataaatgagtttttataagattagaggattatggggttaattttggtggtgtgtatgggtgtggacgcgttgttttgttaattgttttaattttttttatttttttatttttttttgtgtttttggtttttattttttatgatttttttttttttttttattgtttttttttgattttttttattatagtgtttgttgttttttttattttgatttttggagggagtaggggttcggatatttggattttttggtttttgttgttgagagtattgaatttttgtattttatagagattgaggttgagaaatatagttaggtatatgagtttttaaataggtttagtttattgttttaatgttattaaagtagatagtatattggtgtatttttggggttattaaaaattagaagaagtttagattttttattttttgttatttagttggttttagtttttttatttttttttttgttttttggtgtatgttttgttgtaattattagagtttgagttattttttttaggagatttagatttagaattatttagagtaagattatagttggtgaatagtttaggtaagaaatatattttgggggattgggtagtttgatatagatatatttaatatattggtgaatataatagattttttgtttgaagaaggatgtggagttgaagaataatttttttaaagaggttttaaataggtcgggtacggtgatttatgtttgtaattttagtattttgggaggttaaggtaggtggataatttgaggttaggagttcgagattagtttggttaatatgttgaaattttatttttattaaaaatataaaaattagttaggcgtggtggtgggcgtttgtaatttaagttatttgggaggttgaggtaggagaattgtttgaatttgggaggtggaggttgtagtgagtttagattgtattattgtattttagtttaggtgatagagtgagattttattttaaataaataagtaaataaataaataaataaataggttttagattttattggggttttgatgggaatgatggaatatagagatattatgaggttgtaggagagagaagggataagtgaaggagggaagtttttgagtaaatgggggaatgagttttatgggattagtagagggtaatttttggatggaaatatttgttttttggttatagagatgagggtagagaatagtgatgtaggagttagtaggaggagaatttggtggagtaagaggtaagggtattagtttgagggtttgagtcgggatgggaaaggatgtttggtttgaagtttttaggagaaagtaaaagagttttaacgattttatgatgggttatggggaaatgagtgtaatatagaagtagttatttttcggattagtgatgagtttttacgtgaagatattggttttgtatggtgtataggatttagtagcggaatatagttttgtttttttatgaatttgtagatattggttgttattttttattaagtttttagttttttttttcgttatatagggatgatgatgtataattaatgttgagtttgttgagattagaggtaagaaagttgaggatgtggtataatgattattaagtataaagttttttatcgatggtagttattaaggtttgtgtttattgtaaattataggattttttttttgaattataattggataaaattgtataggtttttttttttggtatgttttagtttattattgtagaatttttattatttattgtaataattttttgaattggttgttttagagatttttgaggataaagagtttttagggtattttggtggttggatgggtggtaggggagggagatatttttgagttgtttttgagattgtagagtattaaagtttattagaaatgtgagatatatatgtaattttaaagtgttaagtaggtattttaaaaaggtgaagagaaatatgcgaatttaattttaataaaatatttaatttaaatttaaatagttaaattattattattttaatatgtagttaatataaaaattattaatgagatggttataatattttttttatattaagtttttgaaatttgatgggtattttatttttatagtttgtttttagttggattagttataatttaagtgtttgaaaattatatgtggtgagtgattagtgtattagatagtttttttgtgttagtagcgtggtagggtagaggtagaaagagatttttgttggaattcgatagtttgggttgttgggtgattttaaggaattaattgaaatgttttaagtcgtatttttttcgtttgtaaaatgggtattataaagatagtgatttttatagtaataattttgaggaaggttgttgtaagtattagaagagaagattaggtcgggcgtagtggtttatatttgtaattttagtattttgggaggttgaggtaggtggattgtttgagtttaagagtttgagattagtttgggtaatatggtgaaattttatgtttattaaaatataattaaaaagaaaaattagttaggtacggcggcgtgtatttgaaattttagttatttaggaggttgagataggagaattgtttgaatttgggaggcggaggttgtagtgagtttagattacgttattgtattttagtttgggtgatagagagagattttattttaaaataaataaataaataaaataaaataaattaaaaaaaagagagaaggttagtttttagtaagaatttgatatgtattttgtatatttgatttaatgaaatgttatatttaatatatatttggattattatttttattacggttttttatatttttaagagtgttgagtttatttaatggatggagaagtattttttatttatttggttaaggtaatcgtagagacgagagtggaaatagagtttgttgttttgattttttttagtatagaatttattggatataatatttgattatacgtcgtttagtattatttacggatttatttgatttatgttggaaaattaattaagtattatgttttgttttttacgatgagagaggaaagggagattttatgattttaaagagagagagcgagtagaatttggagtggagaagttgtatattttttttttttttttgaaacggagtttcgttttgtcgtttaggttggagtgtaatggcgtagtttttgtttattgtaattttcgttttttacgtttaagtgatttttttgttttagtttttggagtagttgggattaaaagtatttatcgttatgtttggttaatttttgtatttttagtagagatggggtttttttatgttggttaggttggtttcgaattgttaattttatgatttattcgtttcggttttttaaggtattgggattataggcgtgagttattgcgtttggttgagaagttgtatattttatagtttttatgtagtgttatgggtgagagaaagttttagtttacgtttgtgtgatattaggttattgaagttgtcgtttattgattttttgatattttatgtttttattttttttttattaaattgatggtaaaatataaaaagttaattattttaggttgggtatagtggtttacgtttataattttagtattttgggacgtcgaggcgggtagattatttgaggttaaggagtttgagattaggttggttaatatggtgaaattttatttttataaaaatataaaaattagttgggtatggtggtaagtgtttgtaattttagttatttaggaggttgaggtaggagaattatttaaacgcgggaggcggaggttgtagtgagttaagatcgtattattgtattttagtttgggtgatagaacgagattgcgttttaaataataataaaaaagttatttatttaaatgtataatttaatggtattaagtatatttatagtgtgttgtaattataattattatttagttttagaattttttaattatattaagtaaaaattgtatatttattaagtaataattttttattttttagtttttttagtttttggtaattattaatttgtattcggtttttgtgagtttggttattttggatattttatataagtggaattatataaaatgtgatttgtggtgttttttttttttttttttttttttttttttttttttttttttttttttttttttttattttagagatagggttttgttttgttgtttaggttggagtgtagtggtttaattatagtatattattaattttgaatttttgggtttaagtgagttttttattttatttttttgagtagttaggattataggtgtgtgttattatatttagttaatttaatttaattttgttgttgttgttgttagagatgaggattttgttatgtggtttaggttgattatgaatttttgagtttaagtaatttttttatttcggttttttaaagttttgagatgataggcgtgaattattatatttagtttttttttgtttagagtaatgtttttaaggtttagttacgttgtagtatatattagtgttttattgttttttatggtagaataatattttattgggtggataaattatattttgtttatttatttatttgttgatggatatttgggttgtttttattttttggttatagggaggagtgtttttatgaatatttttgtttgaatatatgttttttttatatatttttggttttatattttttttttggaggttaaggattttattttttttagttatttaatttttttggtaggggtttgtatgttagtaattatgaggatgtgttataagatgtaattttggttatacgtggtagtttacgtttgtaattttagtattttgggaggttgaggtgggtggattatttggggttagtagtttaagattagtttggttaatatggtaaaattttatttttattaaatatacgaaaattagttaggagtggggtggtgtatatttgtagttttagttatttaggacgttgaggtaggggaattgtttgaattcgggaggtggaggttgtagtgagagattacgttattgtattttagtttgggtgatagagtaatattttattttaaaaaaaaaaaaaaagatgtaattttgtttaataggtataataaaagattgttaatgtatagatgtgggtatgtgtaagggatagtggtgaggatgtttcggttgttgtgggagttttaggggaaggtgagaaagttaggagtgggaaaattggtaggggtagaaatgagggggtggggaaatggtacggaggtttataattgaggaatgattacgattgtattattttagg

SEQ ID NO: 2106 - DNA, 9859 bp, Artificial Sequence
  chemically treated genomic DNA (Homo sapiens)
tttgaaatagtgtagtcgtggttattttttagttatgaattttcgtattatttttttatttttttatttttgtttttgttagtttttttatttttagtttttttatttttttttagagtttttataatagtcggaatatttttattattgttttttatatatgtttatatttatatattggtaattttttattgtatttgttgggtaagattatatttttttttttttttttgagatggaatattgttttgttatttaggttggagtgtagtggcgtgattttttattgtaatttttatttttcgggtttaagtaatttttttgttttagcgttttgagtagttgagattataggtatgtattattttatttttggttaattttcgtatatttagtagaggtggggttttgttatgttggttaggttggttttgaattgttgattttaggtgatttatttattttagttttttaaagtgttgggattatagacgtgagttattacgtgtggttaagattgtattttatgatatatttttataattgttaatatgtaagtttttattagggagattaaatggttaaggaagatagggtttttgatttttaagaggagaatatggggttaaagatgtatagagaaaatatgtatttaaataaaaatgtttatagagatatttttttttatagttaaaaggtagaaataatttagatgtttattaatagatgaatggataaataaaatgtggtttatttatttaatggaatattattttgttataaaaaataatgaagtattgatatatgttataacgtggttgaattttgaaaatattattttaaataaaagagggttggatgtggtggtttacgtttgttattttagagttttgggaagtcgaggtaggagggttgtttgagtttaggagtttatgattagtttgagttatatagtaagatttttatttttaataataataataataaaattaaattaaattagttggatgtggtggtatatatttgtagttttagttatttagaagggtgagatgggaggtttatttgagtttaggaatttaaggttaatagtgtattatgattgagttattgtattttagtttgggtaataaagtaagattttgtttttaaaatgaaagaaaaaagaaaggaaggaaagaaggaggaaggaaggagagaaggaaggaagatattataagttatattttgtatgattttatttgtatgaaatatttagagtagttaaatttatagagatcgaatgtagattagtgattgttagggattggggaaattaggaagtggggaattgttgtttaatgaatatgtagtttttgtttggtgtgattaaaaagttttggaattagataatggttatggttgtaatatattgtagatgtatttaatgttattgaattgtatatttaaatgggtaatttttttattgttgtttgagacgtagtttcgttttgttatttaggttggagtgtagtggtgcgattttggtttattgtaattttcgtttttcgcgtttaagtgatttttttgttttagttttttgagtagttggaattataggtatttgttattatgtttagttaatttttatatttttgtagagatggggttttattatgttggttagtttggttttaaattttttgattttaggtgatttgttcgtttcggcgttttaaagtgttgagattataggcgtgagttattgtgtttagtttaaaatggttaattttttgtattttattattaatttaataaaggaaaaataagagtataagatattagaaaattagtgggcgatagttttagtgatttagtgttatataaacgtggattaagatttttttttatttataatattgtataagaattataaggtatgtaattttttagttaggcgtagtggtttacgtttgtaattttagtattttgggaggtcgaggcgggtggattatgaggttagtagttcgagattagtttggttaatatggagaagttttatttttattaaaaatataaaaattagttaggtatggcggtgggtgtttttagttttagttattttagaggttgaggtaggagaattatttgaacgtgggaggcggaggttgtagtgagtagagattgcgttattgtattttagtttgggcgatagagcgagatttcgttttaaaaaaaaaaaaaagatatgtaatttttttattttaaattttgttcgttttttttttttaaggttatgaaatttttttttttttttttatcgtgggaagtaaggtatagtatttggttagttttttaatataggttaaatggattcgtgagtgatattaaacgacgtataattaagtattatatttaatggattttgtgttagaagaagttagaataatagattttgtttttattttcgtttttgcggttattttggttagatggatgggaggtgtttttttatttattggatgggtttagtatttttggggatgtagaagatcgtgatagaaataatagtttaaatatgtattggatatgatattttattagattaggtatgtaaagtgtatgttaggtttttgttgagagttggtttttttttttttttttaatttattttattttatttatttatttattttgagatggagtttttttttattatttaggttggagtgtagtggcgtgatttgagtttattgtaattttcgttttttaggtttaagtaatttttttgttttagttttttgagtagttgggattttaggtgtacgtcgtcgtgtttggttaatttttttttttaattgtattttagtagatatggggttttattatgttgtttaggttggttttaaatttttgagtttaggtagtttatttgttttagttttttaaagtgttaggattataggtgtgagttattgcgttcggtttggtttttttttttaatgtttgtagtagttttttttaaaattgttattatgagggttattgtttttatggtatttattttgtagacgaggaaagtgcgatttagagtattttagttaattttttaaagttatttaatagtttaggttgtcgaattttagtaaaagtttttttttgtttttgttttgttacgttattggtatagaagagttgtttaatgtattagttatttattatatgtggtttttaagtatttgaattgtggttagtttaattggagataggttgtaggagtaaaatatttattagattttaaagatttagtatgaaaaaaatattgtgattattttattaatagtttttatattgattatatgttaaaatgataataatttggttatttaagtttaggttagatattttattaaaattaagttcgtatgtttttttttatttttttaaagtgtttatttgatattttgaaattatatatgtgttttatatttttaatgaattttgatattttataattttagaaataatttagagatgttttttttttttattatttatttaattattaaaatattttgaggattttttgtttttaagaatttttaaggtaattagtttagaagattgttgtaatgaatgatgaggattttgtaataatgagttggaatatattagagaggaaaatttgtgtaattttgtttaattatggtttaagggaaaaattttgtgatttgtaatgaatataggttttggtggttgttatcgatgaaggattttatgtttgataattattgtattatatttttaatttttttgtttttgattttaataaatttagtattgattatatattattatttttgtgtgacggaagaggaaattaggagtttgatgagaaatgatagttaatgtttgtagatttatgagagggtagggttgtatttcgttattgggttttatgtattatgtagaattagtgtttttacgtggagatttattattgattcgaaaggtgattgtttttgtattatatttatttttttatgatttattataaagtcgttagggtttttttgtttttttttgaaagttttaaattaaatatttttttttatttcgatttaagtttttaagttgatgtttttgttttttgttttattagattttttttttgttggtttttgtattattgttttttgtttttatttttgtaattagaaaataagtgtttttatttaagaattattttttattggttttataaaatttatttttttatttatttaagaattttttttttttatttatttttttttttttttgtagttttatagtgtttttatattttattatttttattaggattttaataaagtttagagtttatttgtttatttatttatttatttatttatttgagatggagttttattttgttatttaggttggagtatagtggtgtaatttgagtttattgtaatttttattttttagatttaagtaatttttttgttttagttttttaagtagtttgaattatagacgtttattattacgtttggttaatttttgtatttttaatagaagtgaggttttaatatgttggttaggttggtttcgaatttttgattttaagttatttatttgttttggttttttaaagtgttgggattataagtatgagttatcgtgttcggtttgtttagaatttttttaaaaaaattattttttaattttatatttttttttaaataaagagtttattgtgtttattagtgtattaagtgtgtttatgttaagttatttagttttttagaatatgttttttatttggattgtttattagttgtggttttgttttgggtagttttaggtttgggttttttggggagagtgatttaggttttaatgattgtagtaaaatatatattaaggaataggaggaggggtaaaggaattaaaattagttgggtagtaggaaataggaagtttgagttttttttgatttttgatggttttaagaatatattaatatattgtttgttttaatggtattaggatagtgggttgggtttgtttagaaatttatgtatttgattgtattttttagttttagtttttgtgggatgtagaggtttagtgtttttaataataagggttaagaaatttaagtgttcgggtttttgttttttttaagggttaaggtaaagaaagtagtaagtattgtggtgagaagaattagagggaggtaatgaaaggaagagaagaagttatgagggatggagattagaaatatagagagaggtaagggagtgggggaagttgagatagttggtaggatagcgcgtttatatttatgtatattattaagattaattttataattttttgattttgtggaagtttatttgtagttttttagtttaaagaaataatcgtttttttgaaatgttaagtatttttttaagggtattagagtgatatggagaaatatggtaagatagttatagaattagagataacgatattgattttaaaagtattattattaaggtattgttgtattaagattgttttttttttttttttagagatagtattttgttacgttgtttaggtatgttttagatttttgggtttagtgatttttttgttttagtttttttaaatgttgggattataggtatgagtcgggttgtttttaattttaagtaatttataatttataattatatttaataatggttttaataaggggtgtttaattttttgttttttttgggttatattggaagaagaagaattgttttgggttatatataaaatatattaatattaacgatatttgatgagttaaaaaaaaaaaaaaaaaaaaaaattttttaaaaatttgataatgttttaagaaagtttatgaatttgtgttgggttgtatttaaagttattttaggttatgggttggataagtttagtttagaattaagacgaaatttatggtttattttataagaattttgtaagagggtaatattaggttaggttatatttggaaaatattattaagaattatatttattttaatttttttttttttttatttttaatatggtgatttttttttttggggattgttattttatggttttaagaaagttattatagtttttgattttatattatagtaggggtttttaatttttaggttatagattaatatatagatcgatatcggtttgtggtttgttaggaagtgggttgtatagtaggtgattggtaggtgagtaagagaagttttatttgtatttatagttattttttattgttggtattattgtttgagttttgttttttgttagattagtggcggtattagatttttataatagtgtgaattttattgtgaattgtgtatgttagggatttgggttgtgtgttttttatgagaatttaatgtttgatgatttgttattgttttttattatttttagatgggattgtttagttgcgggaaagtaagtttagggtttttacggattttatattattgtgagttgtataattattttattgtgtattataatgtaataataataatagaaataaagtttataataaatgtaatgtgtttaaattattttgaaattatttatttcgttattttatggagaaattgttttttatgaaattggtttttggtgttaaaaatgttggggattgttatattttagtattttatattaggaggatggggatgagatggagaattattgaagatttttaattagaagggtgatatgtttatttgtattttataaatatttgtgtttgtattttataaatatttttttgggattataataatagatgtattttagaagatttttaaggtatgaagggtaataaatgaagacgtgtttaggagttatatggaagttaatattttgtaaggggattaaaataaagggaatggtagaggatattattatgtatagaggagaagggtttaaatgttaagagaaaataagagataagggattttatagagagtaattgttagaaaaatttgtaggttttttgaagtttgattgttttttttaaaacgggggttttgggatatttttatttgttttttatgagtttttttttttaaaatataagtaggttttttttttggttattaaatggtttgtgattagtatattaggttgggtaaaaatagagttaagtgtgtgttttaaagtgattatggtgaagaaaaaagcgaaagttttaaaatggatttttatttttgtgtttgcgtaaggttaaaagggaagatgttttagggttgatcggaatgggagtatttttgtttatgttgtaaaagtttttgatttttttggtaattgaaatatgagaaatggtttcggcgagtagtatagttttttagtaaagtattggattgaggtggtaaagttagattgtttggattagaattttaggattattgtttattagtttcggataagttagttaatttaggggttttaaatattttttttaattttttttttttgagatagagttttattgtgttatttaggttggagtacggtggtgtgattttggtttattgtagttttgttttttaggtttaagtgatttttttgttttagtttttttagtagttgggattataggtgttcgttattacgtttggttaatttttgtattttttaagtagagatatggttttgttacgttgattaggttggttttgaatttttgattttaaataattatttgttttggttttttaaagtgttgggattataggacggaattattgtattgggttataaatattttttatgaagagttagatggttaatatattttatttggtaggttatagggtttttattataattttttggttttgttgttgtagtttgaaaatagttataagtaaagttgtaaatgaggagtatgattgtatgttaataaaattttatttaaaatacgataattggattttatataagttttgtatggtataaaatattttttatttgattttttttagtcggtaagaaatattaaagttatttttggtttttaggttatataaaaataagcggtggttagatttgatttttgatttaattgtattgggttttagatattttatttgtgaattgagagtaatgatatttatagaggtgttttttggagtagaataaataagattagtgatataaagtatttggtatgaattttagtgtaataagtattattaatattttagtaattatataaatttttttatttgttgttttacgttttttgcggtgaatttatttatgtttaaaatttgaattatattttagttaatatttattagatttttgtttttagtttagatttgtttttgatgtttagatatattattttgggtttttgtttttttttaaatttatttgtagtttttgttttttttatttttttttataattttgttaaggattaaattgtgttatatttttttttaaatttttaggttgaagtttttattttatgatatggtttggttgtgttttaattttgattttattttgaattgtagtttttataatttttacgtgttgtgggaggaattaggtgggagatagttgttttatggggacgattttttttataatgtttttatggtagtgaatatgttttacgagatttgacgattttatgaggggtttttttttttatttggtttttatttttttttgtttgttgttatgtaagatgtttttttgtttttttttcgtttttcgtaatgattgcgaggtttttttagttatatggaattgtgagtttattaaattttttttttttataaattatttagttttgggtatgttattattagtagtatgagaattgattaatatattttagtatgttagaatgtgattgtatttggggatataatttttaaagaggtaattagttgaaattgaggttattagggtgggttttaatttaatatgattgatatttttatgaaaagaggagatttagatatagataggtatagagggaaaattgtgtgaaaatatgaggaggaggcggtatttgtaagttaaggagagaggatttaggaggaattaattttgttgatattttgattttaaatttttagttgataaaattgtgagaaaatatatttttattgttgtagttatttagttaatggtattttgttatggtagttttaataaattaaatattttgtttttttttattgattttcgttttaatgatagtttttaaatttacgtagttattttggtgtaatagttttgaagaaaatggttataatatttttggatattttttttattgataggaaggtaggtatattgtatcgttttttttttggaatttgggtagggttgggattattttgattaaagaacgtggtagaaatgatttttacgtagtttttaaggttaggttaaaaaaggttaggaagtattttttggtttttttgggatacgtgttttggaggaaggtagttattgttttgggattttgatttttttgagattattatgttggaaaggttgtttgtaggtatttggtgtaatattagtttagtttagtatttgagttattttaatttaggtatttgatatgtgaatgaaggagttttagatgattttaatttatagttttttagttattttttagatttttgagttttgggtggtagagataagtatttttgtgttttattttaatttttaatttatataatttatgaacgtaatgaaatggttgttttatatgttatgatttgggtggttatatagtaattatgaattatgaatgtgggttttat

SEQ ID NO: 2107 - DNA, 10886 bp, Artificial Sequence
  chemically treated genomic DNA (Homo sapiens)
gtaattttagtaaagttttaggatataaaattaatgtataaaaattataagtatttttatatattaataatagataaatagagagttaaattatgagtgaatttttatttataattgttttaaagagaataaaatatttaggaatttaatttataagggacgtgaaggatttttttaaggagaattataaattattgtttaatgaaataaaagaggatataaataaatggaagaatattttatgtttatgggtaggaagaattaatatcgtgaaaatggttatattgtttaaggtaatttatagatttattgttatttttattaagttattaatgattttttttatagaattggaaaaaattattttaaagtttatatggaattaaaaaagagttcgtattgttaagttaattttaagttaaaagaataaagttggaggtattacgttatttgattttaaattatattataaggttatagtaattaaaatagtatggtattggtattaaaatagagatatagattaatggaatagaatagagtttttagaaataacgtcgtatatttataattatttgatttttgataaatttgagaaaaataagtaatggggaaaggattttttatttaataaatggtgttgggaaaattggttagttatatgtagaaagttgaaattggattttttttttatattttatataaaaattaatttaagatggattaaagatttaaatgttagatttaaaattataaaaattttagaagaaaatttaggtattattatttaggatataggtatgggtaaggattttatgtttaaaatattaaaagtaatggtaataaaagttaaaattgataaatgggatttaattaaattaaagagtttttgtatagtaaaagaaattattattagagtgaataggtaatttataaaatgggaaaaagtttttataatttatttatttgataaacggttaatatttagaatttataatgaatttaaataaatttataagaaaaaaataaaaaattttattaaaaagtgggtaaaggatatgaatagatattttttaaaagaagatatttatgtagttaaaagatatatgaaaaaatgtttattattattggttattagagaaatgtaaattaaaattataatgagatattattttatattagttagaatggtaattattaaaaagttaggaaaaaataggtgttggaaaggggagaaataggaatatttttatattgttggtgggattgtaaattagtttaattattgtggaagttagtgtggtgattttttagggatttagaattagaaatattatttgatttagttattttattattgggtatatatttaaaggattataaattatgttgttgtaaagatatatgtatacgtatgtttattgtagtattatttataatagtaaagatttggaattaatttaaatgtttaataatgatagattggattaagaaaatgtggtatatatatattatggaatattatgtagttataaaaaatgatgagtttatgttttttgtagggatatggatgaaattggaaattattatttttagtaaattattataaggataaaaaattaaatatcgtatgtttttatttatagatgggaattgaataatgaggaaatatggatataggaaggggaatattatattttggggattgttgtggggtggggggaggggggagggatagtattgggagatatatttaatgttaaatgacgagttaatgggtgtagtatattagtatggtatatgtatatatatgtaattaatttgtatattgtgtatatgtattttaaaatttaaagtataataataaaaatatatatatatataagaaagaaattttaagaagaaattttaagttttttttatagtatttaagattaattaagaaattgtttttgtcgttttttatatatttaatgtttattgttgtttgttttattatttatgttttggtaaataaaagtaatttgtttttttgtgatttttttcgtgggtatttttatttttttttgataagaatgtattatttttttttttttatttgagtttttaagatttagtttatatgttttttttttcggatattgattttagattcgtgaatttgagttagtggttttttttagaggattttataaggagttaggtatttgtttattattacgtgtttttattttattgtaattaagtattgtatttttatttttttatttaggtggttcgtagagtttatgtttgattgatttttatgtttttagtagttagtaaggaagtatttttttagagatttgtatttatataatatttattattttttatttttcgatatgtgaattttattgagaataaacgagtaaatgtaggtaatgtgttttttttttttttttttttttttttttttttttagatggagtttcgttttgttgtttaggttggagtttagtggtataatttcggtttattgtaattttcgttttttaggtttaagcgattttgtcgttttagtttattaagtagttgggattataggtgtttattattacgtttagttaattttttttgtatttttagtagaggtggggttttatgatgttggttaggatggtttttaatttttgattttaagtgatttatttatttcggttttttaaagtgttaggattataggtgtgagttatagcgtttagttagtaatgtgtttttttaagttttgtgagttattttaataaattattagaatagaggaaggggttataaatatttttttattttcgatttatagttagttagttagaagtataggtggttatttgggatttggattggtgtttgaagtgaggatagttttgggagagtgagttttttaatttgtgggatttgatattaattttaggtagatagcgtcggagttgaattgaattgtgagatatttagtggtgtttttagagaattggagaattgtttgatatggaaaagatttatatatttgatgttagaagtattgtataagtcgagaattgagtttgatttaattattatatttgggtttgattgcgtggttgaaattttttttattttagtaattgttttttttatttttatgaaattttgaagaaggaagggttggatatttagattttttgatttttgatatttggaagtatgaattttagttttttatagaaggttagaggtgaaggaatatttagatatattggtttttaagaagagttcgttgataatatatttaaggtgttttttgaaaattataagaaattttgagtttttgttaggggattggttttagttttattgttttttttttattatttagtagttttcgcgaaagtttttagagtcggtgttgttttataggaagttaagaagtatataggaaaaggagtttagttgttggtaagttggggattgataatttaaaatttattaatggaatttttgttttttgataaatattttttaaattttagagtagtgttgtaatggagtatttatttgttataggtggtttttgagtgtttatgtttttattttgatttgaaatgtgtttaagtgtaaaatatatttagtgtagtttaattattagtatgattaaaataatataatttatttcgttaataatttttattttggtaacgtgttttaatgattttttttatttgcggggttaaatgaaatatattattataattaattttttttaatgattttatttttttaatatggttattagaaagttgtaagttacgtgtgtggttggtatttagggtttgtattattttgtttttattaaaaatgtaaataataaattagttaggcgtagtggtgggagtttgtaattttagttatttaggaggttgaggtaggagaatcgtttgaatttaggaggtcgaggttgtagtgagtcgatatcgtgttattgtattttagtttgggtaagaagagtgaaattttaatttaaagataaataaatatgtgaaggagttaagtgtgaggagtttaagaggaagagtatggtaggtagaaggaatagagaaggtagaagtttcgagatgataatgagttgtatgtttaaggaattagagttcgttatgggtggagtttagtgtgttttacgagagtgtagagatgaggtttgaggaatgtatagggtaggtttaggggtatttgagggaatttaagataaggataagttagaagtttggaagttattagaaggtgttgaaaatagtattattattttattggattttttttttttttttttttgagatagaattttgttttgtcgtttaggttgaagtgtagtggcgtagtttcggtttattgtaaattttgttttttagggttaagcgatttttttgttttagttttttaagtagttgggattataggtattcgttattacgtttagttaatttttgtgtttttttagtagagacggggttttattatgttgggtaggttggttttgaatttttgattttaggtgatttatttattttagttttttaaagtgttgggattataggtatgagttattttcggtttttattggattttttttttttttttgagatagagttttgtttttgttgtttaggttggagtgtaatggtacgattttagtttattgtaattttcgtttttttggtttaagcgatttttttgcgttagtttttcgagtatttggaattataggtacgtgttattacgtttagttaattttgtatttttagtagagatggggtttttttatgttggttaggttggtttcgaatttttgatttttggtgatttatttgtttcggttttttaaagtgttgggattataggtgtgagttattgtatttggtttttattgaattttttaaaagtttatttggtttttttttggagattggattgtagggtaggggaaagtaggattaggaataatttatttgtaaagttggcgtaaatatttttgtttgataggattatggatataggttgtagagatagagatggttttggttgtgtatttagtagattttgtagatagaattaataggatttggatgggattgtggtgagagaaagtgaaatgaaagataagttttagtttggaagttttaataattgaatgtttaaatttaaatagatataaaatattggaagagtggtaggtttgggaggatgagataattaattgtttggttgagttacgttaggtttgaaatgtttacgggattttcgtggggagaggttatattagattggagtattagagagaggttaaggttgatagtttagatgaaaagagagtatgatattttaagttttgagattggataatattatttatagaaagattatatagagataagagaggtggggaataagtaaaagttgcgggatatttttaaatttagagttaaatttagagtagaaaatattagtaaaggggattgaaaagcggtggttaattgagttttaaatgtaagtgaaagtgtgttgtgtgtatatttattattttatggtataggaaaaacgtgatttaaggagaaggaagcgatttaatgggaagaagagatttaatggattttttattacgaagatattgagataagaattaatatggatttgtatttattgtatttgtagttttgaggttataagtatttttaggaaaatgtattaggttagtgttaaggattggagttaatatagattggatttaggagaaaaagtgaggtagggaattaaagggagtaaatatagaaaattttttttaaaatttggttgtaaattttttttatagaaagaatttttttaggagaaatagggttaatattagaaaggaatatagtttaagatttttttggttgttttttgttttgttttttggggtggtttttattttgtttttgtttagttttgttgttgtttgtttgtttgtttttgagacggagttattgttgtttaggttggagtgtagtggtgcgattttagtttattgtaattttcgtttttcggtgtttaagaggtttttttgttttagttttttaagtagttgggattgtaagcgcgtgttattacgtttagttaatttttgtatttttagtagagatgaggttttattatgttggttagtttggttttaaatttttggttttaagtgatttatttgttttagtttttttaaatgttgggattataggtgtgagttacggtatttggttaaggatggtttttttttaaagggaggggatatgatttatgtaatgtttatgtaatagtgagaatgatttagtagaaataaaattttgagggtttgtttttggtagaaaatggaaggataaatgtagggggaaagtttgtgggaagatgagagggtattttgggttaatgtagggagggaaattattggaaagaataagaagtttttatttatagtgatagaggtaggtagattgagggttaggggaggatcggttgaaaattttatatttagttattattatttttttattataatgttagttaagggtatttgttgagagtgggaaaaatagagtaaatgaggtattttttggagaaagtaggattgaaataattaaggtgtgggatagcgagtgcgttggagaagtagagtaatttaatgaggaattgttgagtttttatttgaaatttgtggttataaatttaattgtaattttcgataattgtgaaagttattttcgttttttgagtcgtatttttttatttgttatataaggatagtatttgttttaaagtaagggtattgtaattagagatgataaaatatatagtgattggtatatattaaggatttattaaatagtagattttataattagtataggtattatttgtggttcgtagtttttttttttatattataattagggtggatttaaaattttgtaatttttgttttgttaatttgtttttatttgttattgtataattatttttttttgttgtattaatatttttttttttttgagatagagtttcgtttttttatttaggttggagtgttgtggtacgattttggtttattgtaatttttgttttttagatttaagtgatttttttgttttagttttttaagtaattgggattataggtatttattattatgtttagttaatttttgtatttttagtagagatagggttttattatgttggttaggttggttttaaatttttggttttaagtgatttatttgttttggttttttaaagtgttaggattataggcgtgagttattgcgtttagtttgtattaatattttaaaatgaatttgaaattatggatagattatgttttttaagtgttttgtagaatgtttggagtgtggatagagaaaatttgagtttgttgaggaattatggggtggaaaagggttaatagtataattttgttgtaattaatttggttgagttttaattttgtttttattttttttatttggtaacgttgaataattaacgtagtttatttaagttttaatttttttatttgtataatggttatattaattattaggttgttgtaaaagtatttgtggtttttgatattatttttaatggtaaaaatagcgttatttttgtattaatttaatattattaagattaattaatatttattgtgttttaggagtgtttagtgtttatatatattaatatagtttatttatagattttgtgagaggcgttgatagggttaaaggaaaagtttttggtgtgtgggtaatgtttataagtagaaataattattgttatgagtatcgtttttgttttgattttgaattttataatggattgagttttacgatatagtatatagtttggtgagggttaagagtttttatttgttatagatatatttagtttagtttaaaagatttttatatttatttttatttaatttttatttgaaagttagattttattataaaattgttttcgttttgtagagtagaaaattgaggtttaaagagatattattgattaaaaatttatagtgaggagatattatagatgagattagaagagagatgtagttgattttagagtttagtatatatatatattttagatagagtttcgttttgttttttaggttggagtgtagtggtacggtttattgtaattttcgtttttcgggtttaagcgatttttttgttttagtttttcgagtagttgggattgtaagtgtatgttattaggttcggttaattttttgtattttcggtagagacggggttttatcgtattgtttagggtggtttggaatttttgattttaggtaatttattttttttggttttttaaagtgttgggattataggcgtgagttatcgtatttggttgagtttagtattttttgtaatagtgatttttaattgggggtgattttgttttcgaggggatttttgataatgtttatggaatttgttgattgttatttttggagaaggagttgttattggtgtttgtggatagaggttaggggggttgtttaatattttattgtgtttagaatagtttgttataacgaagaattatttagatttagatgttaaaggtgttaaggttgagaaattttgagttatattaaataacgttttatggaatattttagtgaaatttattggtaatagtaggaagaaaaggaggaaataaggaaaaggaagaaggttaaaaattattagattgaggtatagttttattttagtaattttgggggaattttttttaaaggtaggattttcgtatgtaaaggtagtggttttggagttgtttatttcggttttcgtattttgttgtttttattgattggttgggtatgatgttgaaaaaaattatagaagttttcgggttatgaatttttttagatgtgatggttgttttttaatgttattatgagtattagatgtgaataagtgttatggaattgttattttttttaaagatgttgaatagtttagtttgagatgatttttaaatttttatggttatagtaaattattttggtttttatatatatagattttagaatgagatttatggatataattgttttttatttttattataagtttaggggtatatgtgtaggtttgttatataggtaaatttgtattttggtgtttttttgtatagattattttattattgagatattaagtttaatatttattatttattttttttgattttgtttttttttttattttttatttttcggtaggttttagtgtttttttttttgtgtttatgtgtttttattatttattttttatttgtaaatgagaatatgtggtatttggttttttgtttttgtattagtttgttaaggataatgaatataattttaataggtagtttggatgtttttgataaagtttatagattacggtataagaaaatgtgtttaggtgacgtgggattttgtgttgaattggatataaatattatagatgtgattcggattagaggtagggattatatgttttgggtttttgtttttaaaagaaaaaaataaaaataaaaaaatttgatttgagaagttttgaagggttatatttttataatgttattgtttataatttagttacgtgtttattattaaagtaattttttgtaaagtaaaagggattttggttagtgttaattagattagttaggatttatttttaatatggagaaaagatattttttttgtagggtgagtaattaaatataattgtggttttttaagtagagaagaatggggaatcgttgttgggtgggtaattagtaatatttgttaagcgtaagggtttagaagttagattatgttaaattgaagttttgaatttattatttattatttaagtgatttttaatatattttataattgttttgagtttttatttattttaatgaaaattagaagtaatgaatattatatagttattatataggttaaatcggattttatatgtagtaattaatataatgtatagtttttaataagaattttataagtattaatataatttattatttttatagtttttattttatagatattaaagttatataaatcggtattgattatttgtattttaaatagagaagagttttatattaagtagggatagggaaaagtagagggtagaaagtagagatggaattttttttgttgattttttttagtgtagaatttttaggatataatatattattatatgttattagtgattttttaaaattttttttaataataattttaagttaaatttttaaattttattttgagtattagttaagtaataggttaagggtttttatagtttgagggataggagttgggagattggaagaatttggggttgaaagagattgtagagtttgttagtatgtttgtattgaatggtgggagatatagatgtgagttttttgattttgagttatgtgttttttttataatgttgaggttgtttatgtttaattttttattgtttatataatataagtttagtatgagttttgtaatttttttggtgaagtgattagttcgataagcgaaatgtatattgataatgatgggaatatggaggattatttttttttaaaggagtatttaagagaatgttaattttatagtatcgttgttaataaggtttggtagatagagtgggttttttggtaggagtgggagttttagtggaagttgatgtgagttataaatatagatgttgtaagatggttttatagttgagaaatggttattgttggaatgttttagg

SEQ ID NO: 2108 - DNA, 10886 bp, Artificial Sequence
  chemically treated genomic DNA (Homo sapiens)
tttgaaatattttaataatggttattttttagttgtggaattattttatagtatttgtatttatagtttatattaatttttattaaagtttttatttttattaggagatttattttatttattaagttttgttgataacggtgttatagaattggtatttttttggatgtttttttgggaagggatagttttttatatttttattattattaatatgtatttcgtttatcgggttgattattttattaagaggattataaggtttatattgaatttatgttgtatggataatggaaaattgagtataggtagttttagtattgtgaggaaggtatatgatttagaattagaaggtttatatttgtgttttttattatttaatgtaaatatgttggtaagttttgtaattttttttagttttaggtttttttagttttttaatttttgttttttaaattgtgagaatttttgatttattgtttggttagtatttaagataaagtttgagggtttggtttgaggttattgttgaagagaattttgaggagttattggtaatatgtagtagtatgttatattttgaggattttgtattagaggaagttagtaaagagagttttatttttgttttttattttttgtttttttttgtttttgtttgatgtggagtttttttttgtttggaatgtaaataattagtgtcgatttgtatagttttggtgtttgtgggataaagattataagaataataagttgtattaatatttgtgaagtttttattagagattatgtattgtgttaattattatatatgggattcggtttggtttatgtaatagttatgtaatatttattatttttagtttttattagaataaatgaaagtttagggtaattgtgaaatgtgttgaaggttatttaggtagtagataatagatttaggattttagtttggtatggtttgatttttaaatttttacgtttgatagatattgttggttgtttatttagtaacggttttttatttttttttgtttgaaaaattataattgtgtttagttatttattttgtagagaaggtgttttttttttatgttgggagtaaattttgattagtttaattagtattaattagaattttttttattttgtaagggattgttttggtagtggatacgtgattaaattgtggataataatattgtaagaatatgattttttagagttttttagattaagtttttttgtttttgttttttttttttaagaataaaaatttaaaatatgtagtttttgtttttggttcggattatatttgtaatatttgtatttagtttaatataaagttttacgttatttgagtatatttttttatgtcgtggtttgtggattttattagaaatatttaggttgtttgttaaaattgtatttattatttttagtaaattaatgtaggaatagaaaattaaatattatatgtttttatttataaatgggaggtaaatgatgagaatatatggatataaagaggggaatattggggtttatcggaaggtggagggtgaggggagggataggattaggaaaaataagtagtgggtattaggtttaatattttagtgatgaaataatttgtataagaaaatattaggatataagtttatttgtataataaatttgtatatatatttttgaatttataataaaaatgaaaaataattatatttataaattttattttagaatttgtatgtgtaaaagttaggatgatttgttatggttatgagaatttgagaattattttagattgggttatttagtatttttaagagaaatagtaattttatagtatttgtttatatttaatgtttataataatattgggaaatagttattatatttgggggaatttatggttcggggatttttgtagttttttttaatattatgtttagttagttagtggaggtagtaagatacggaaatcgagatgaataattttagagttattgtttttgtatacggaagttttgtttttgaaagggatttttttaagattattaggatagggttatgttttagtttggtgatttttagtttttttttttttttttattttttttttttttttttgttattattagtgagttttattgaggtattttatgggacgttatttaatgtagtttagggttttttaattttggtatttttgatatttgggtttgggtaatttttcgttgtggtagattgttttggatatagtaggatgttgagtagtttttttggtttttatttatagatattagtagtaattttttttttagaaatgataattaataggttttataaatattgttaaaggttttttcggaggtaaagttatttttaattgagagttattgttataaagaatattgggtttagttagatacggtggtttacgtttgtaattttaatattttgggaggttaaggggggtggattgtttgaggttaggagttttagattattttgggtaatacggtgaagtttcgtttttatcgaaaatataaaaaattagtcgggtttggtggtatgtatttgtagttttagttattcgggaggttgaggtaggagaatcgtttgaattcgggaggcggaggttgtagtgagtcgtgttattgtattttagtttgggggatagagcgagattttgtttaaaatatatatatatattgggttttgaagttagttatattttttttttaattttatttgtgatgtttttttattatgagtttttagttagtgatatttttttgagttttagttttttgttttgtagaacgaggataattttatggtgaagtttaatttttaggtgaggattaagtgagaatagatgtggaaattttttaggttagattgagtatatttatgataaatgggaatttttggtttttattaggttgtgtgttgtgtcgtggggtttaatttattatgaagtttaaggttaggataagaacgatgtttatagtaatagttgtttttatttatgaatattatttatatattaagagttttttttttaattttattaacgttttttataggatttgtggatgggttgtgttaatatgtgtgaatattgagtatttttgagatatagtgaatattgattaattttagtgatattaggttggtgtaaaagtaacgttgtttttgttattgaaaataatattaaaaattataagtatttttgtagtagtttgataattagtataattattgtatagatgaggaagttaagatttagatgggttgcgttaattgtttaacgttattaggtagaaagagtagagatagaattggagtttagttagattgattataatagaattgtgttgttaatttttttttattttatagttttttaatagatttagattttttttatttatattttaaatattttataagatatttagaagatatgatttatttataattttaaatttattttaaaatgttgatataggttgggcgtagtggtttacgtttgtaattttagtattttgggaggttaagataggtggattatttgaggttaggaatttgaaattagtttggttaatatggtgaaattttgtttttattaaaaatataaaaattagttgggtatggtggtgggtgtttgtaattttagttatttgggaggttgaggtaggagaattatttgagtttgggaggtagaggttgtagtgagttaagatcgtgttatagtattttagtttgggtgaaagagcgagattttgttttagaaaaaaaaaaatgttgatgtaataaggaaggatgattgtgtaatgataggtgaggataaattaataaggtaaaaattgtaaagttttgggtttattttagttgtaatgtaaggaggagaattgcgaattatagatgatatttgtattgattatgaggtttgttatttggtgagtttttaatatgtgttagttattatatattttattatttttgattataatatttttgttttgggataagtgttgtttttgtgtaataggtaggaaagtacggtttagagagcggaagtgatttttataattatcgagggttgtaattgaatttatgattatagattttaaatgaaaatttagtagttttttattaggttattttatttttttagcgtattcgttattttatattttaattattttagttttgttttttttaaaaagtattttatttattttgttttttttatttttagtagatgtttttgattgatattataatgagaaaatggtaataattagatgtgaaatttttagtcggtttttttttgatttttagtttatttgtttttgttattgtgaataaagattttttgttttttttaataatttttttttttgtattggtttaggatgtttttttatttttttataaattttttttttgtatttgtttttttattttttgttaaaaataaatttttaagattttatttttattagattatttttattattatataaatattatataaattatattttttttttttaaaaagaaattatttttggttaggtgtcgtggtttatatttgtaattttaatatttagggaagttgaggtaagtggattatttgaggttaggagtttgagattagattggttaatatggtgaaattttatttttattaaaaatataaaaattagttggacgtgatggtacgcgtttgtaattttagttatttgggaagttgaggtaggaagattttttgaatatcggaaggcggaggttgtagtgagttgagatcgtattattgtattttagtttgggtaatagtgatttcgttttaaaaataaataaataaataataataaaattaaataaaaataaaataaaaattattttaaaaaataaaataaaaaataattaaaaagattttggattatatttttttttggtgttaattttattttttttgagagaattttttttatgaaaagaatttgtagttagattttggaaggagttttttgtgtttgttttttttgattttttgttttatttttttttttgaatttagtttgtattgattttagtttttagtattgatttggtgtatttttttgaggatgtttatgattttaaggttgtaaatgtagtgggtgtaaatttatattggtttttattttaatattttcgtgatagaggatttattggattttttttttttattggatcgtttttttttttttaaattacgttttttttgtgttatgagatgataaatgtatatataatatatttttatttgtatttgaagtttaattggttatcgttttttagttttttttgttagtattttttgttttaaatttgattttaaatttaggagtgtttcgtagtttttatttgttttttattttttttatttttatatagtttttttataggtgatattatttagttttagggtttaaaatattatgttttttttttatttaaattattagttttggtttttttttggtgttttagtttgatataatttttttttacgggagtttcgtagatattttaaatttaacgtggtttaattaaatagttgattgttttatttttttaaatttgttatttttttaatattttgtgtttatttgagtttaaatatttagttgttaaaatttttaaattagaatttattttttattttatttttttttattataattttatttaagttttattaattttatttatagaatttgttgaatgtatagttagagttatttttatttttataatttgtgtttatggttttgttaggtaggaatgtttgcgttaattttgtaaataggttgtttttggttttatttttttttgttttataatttaatttttagaaggaaattaaatgagtttttaaaaagtttaataagggttaggtgtagtggtttatatttgtaattttagtattttgggaggtcgaggtaggtgggttattagaggttaggagttcgagattaatttggttaatatgaagaaattttatttttattaaaaatataaaattagttgggcgtggtggtacgtgtttgtaattttagatgttcgggaggttgacgtaggagaatcgtttgaattagggaggcggaggttgtagtgagttgagatcgtgttattgtattttagtttgggtaataagagtaaaattttgttttaaaaaaaaaaaaaaagtttaataagggtcgggagtggtttatgtttgtaattttagtattttgggaggttgaggtgggtggattatttgaggttaggagtttaagattaatttgtttaatatgatgaaatttcgtttttattaaaaaaatataaaaattagttgggcgtgatggcgggtgtttgtaattttagttatttgggaggttgaggtaggagaatcgtttgattttgagaggtagagtttgtagtgagtcgagattgcgttattgtattttagtttgggcgatagagtaagattttgttttaaaaaaaaaaaaaaaaaaggtttaataaaatggtgatgttatttttaatattttttaatggtttttaaatttttaatttatttttattttaagtttttttaagtatttttggatttgttttgtgtattttttagattttatttttgtattttcgtgggatatattgggttttatttataacgggttttgattttttgaatatgtagtttattgttatttcggggtttttgttttttttgttttttttgtttattatgtttttttttttaagttttttatatttggtttttttatatgtttatttatttttgagttagagttttattttttttgtttaggttggagtgtaatggtacgatatcggtttattgtaatttcggttttttaggtttaagcgatttttttgttttagttttttgagtagttgggattataggtttttattattacgtttggttagtttgttgtttgtatttttagtagagatagggtaatgtaagttttaaatgttagttatatacgtgatttataattttttagtagttatgttaaaaaagtaaaattattgggagaaattaattataataatatgttttatttaatttcgtaaataaaaaaaattattggaatacgttattaaaatgaaagttattaacgagataaattgtattattttgattatattaatgattaaattatattaagtatattttatatttaagtatattttagattaagatagaaatataggtatttaaaagttatttgtggtaagtggatgttttattatagtattgttttagaatttaggaggtgtttgttagagagtaggagttttattgataaattttaaattgttagtttttaatttattagtagttaagtttttttttttgtgtgttttttggttttttgtggagtaatatcggttttaagggttttcgcggagattattgaatgatgggggagggataatggagttggagttaattttttaatagaaatttaggattttttataatttttagaagatattttgggtatgttgttagcggattttttttagaaattaatgtgtttgaatgtttttttatttttagttttttgtgagagattggagtttatgtttttaaatgttaagggttaaggaatttgaatgtttagtttttttttttttagagttttatgaaaatgaaagaaataattattgaagtgggaagagttttagttacgtaattaagtttaaatatgatgattaagttaaatttaattttcgatttatgtagtatttttggtattaaatgtgtgggttttttttatattaagtaattttttagttttttggggatattattgggtattttataatttaatttagtttcgacgttgtttatttggagttagtgttagattttataagttaaagggtttatttttttaaaattgtttttattttagatattaatttaagttttaggtggttatttgtatttttgattgattggttataaatcgggggtggggggatgtttataatttttttttttgttttgataatttgttagaatggtttatagaatttaagaaggtatattattggttgggcgttgtggtttatatttgtaattttagtattttgggaggtcgaggtgggtggattatttgaggttaggagttgaaaattattttagttaatattatgaaattttatttttattaaaaatataaaaaaaattagttgggcgtggtggtgggtatttgtaattttaattatttggtaggttgaggcggtagaatcgtttgaatttgggaggcggaggttatagtgagtcgagattgtgttattaaattttagtttgggtaatagagcgagattttatttaaaaaaaaaaagaaaagaaaagaaaagaagaaggtatattatttatatttattcgtttgtttttaatggagtttatatatcgagaaataaaaggtggtaggtattgtataggtgtaggtttttaaagaggtgtttttttgttggttgttggagatatagagattaattagatatgggttttgcggattatttgaatagagaggtgagaatgtagtgtttagttataatagggtgggggtacgtagtgatagatagatgtttggttttttgtgaggttttttaaaaggaattattaatttagatttacggatttagagttaatattcggaggagggaatatgtaggttgagttttaaagatttagataaaggagaaaaaataatgtatttttgttagaggggagtaaaaatatttacgaaaggggttataaaaaagtaggttatttttgtttattagagtatagatgataaggtagatagtaataagtattaagtatgtagagggcggtagaggtaattttttggttggttttgaatgttgtaaaaagaatttagaatttttttttaaaattttttttttatatatatatatatttttattattatattttaagttttagggtatatgtgtataatgtgtaggttagttatatatgtatatatgtgttatgttggtgtgttgtatttattaattcgttatttagtattaggtatattttttaatgttattttttttttttttttttattttataatagtttttagagtgtgatgtttttttttttgtgtttatgtttttttattgtttaatttttatttatgagtgagaatatgcggtgtttggttttttgtttttgtgatagtttattgagaatgatgatttttaattttatttatgtttttataaaggatatgaatttattattttttatggttgtatagtattttatggtgtatatgtgttatatttttttaatttagtttattattgttggatatttgggttggttttaagtttttgttattgtgaatagtgttgtaataaatatacgtgtgtatgtgtttttatagtagtatgatttatagttttttgggtatatatttagtaatgggatggttgggttaaatggtatttttagttttagatttttgaggaattattatattgatttttataatggttgaattagtttatagttttattaatagtgtaaaagtgtttttattttttttttttttagtatttgtttttttttgattttttaatgattgttattttaattggtgtgagatggtattttattgtggttttgatttgtatttttttgatggttagtgatgatgagtatttttttatgtgttttttggttgtataaatgtttttttttgagaagtgtttgtttatattttttgtttattttttgatagagttttttgttttttttttgtaaatttgtttgagtttattgtagattttggatattagtcgtttgttagatgagtaggttgtgaaaatttttttttattttgtaggttgtttgtttattttgatggtagttttttttgttgtgtagaagttttttagtttaattagattttatttgttaattttggtttttgttgttattgtttttggtgttttagatatgaagtttttgtttatgtttatgttttgaatggtaatgtttaggtttttttttagggtttttatggttttaggtttaatatttaagtttttaatttattttgaattaatttttgtataaggtgtaaggaagggatttagttttagttttttatatatggttagttagtttttttagtattatttattaaatagggaattttttttttattgtttgttttttttaggtttgttaaagattagatagttgtagatatgcggcgttatttttgagggttttgttttgttttattgatttatatttttgttttggtattagtattatgttgttttggttattgtagttttgtagtatagtttgaagttaggtagcgtgatgtttttagttttgtttttttggtttaggattgatttggtaatgcgggtttttttttggttttatatgaattttaaagtagttttttttaattttgtgaagaaagttattggtagtttgatggggatggtagtgaatttgtaaattattttgggtagtatggttatttttacgatattgattttttttatttatgagtatggaatgtttttttatttgtttgtgtttttttttattttattgagtagtggtttgtagttttttttgaagaggttttttacgttttttgtaagttggatttttaagtattttattttttttgaagtaattgtgaatgagagtttatttatgatttggttttttgtttgtttgttattggtgtataagaatgtttgtgatttttgtatattgattttgtattttgagattttgttgaagttgt

SEQ ID NO: 2109 - DNA, 3343 bp, Artificial Sequence
  chemically treated genomic DNA (Homo sapiens)
gaatttaagattagtttggttaatatgataaaattttgtatttattaaaaatataaaaaaaaaaaaaatagttgggagtgatggtgtatgtttgtaattttagttatttgggaagttgaggtaggagaatcgtttaaatttgggagatggaggttgcggtgagttaagatcgtgttattgtattttattttgggcgatagagtgagattgggttttaaaaaaagaggtcgggcgcggtggtttatgtttgtaattttagtattttgggaggtcgaggcgggcggatgataaggttaagagattaagattattttggttaatatgatgaaattttatttttattaaaaatataaaaattagttgggcgtggtggtgtataattgtagttttagcggttgaggtagaagaatcgtttgaatttaggaggcggaagttgtagtgggtggagattatattattgtattttagtttggtgatagagcgagattttgttttaaaaaaaaaaaaaaaagaaagaaagaaagaaaaagaaataaaataataatgggagaggattgcgagggatataaataaaattagttagaagttgatatttttaattgttgaagttggtagttgtgaatgtaagatttattatattggtcgagcgtagtggtttatatttgtaattttagtattttgggagtttgaggtaggtagattatttgaggttaggagtttaagattagattggttaatatatagtgaaatttcgtttttattaaaaatataaaaattagttgggcgtagtggcgtacgtttgtagttttagttatttgggaagttgaggtaggagaatcgtttgaatttaggaggaggaggttagagtgagttgagattatgttattgtattttagtttgggcgatagagcgagattttattttttaaaaataaataaattaaaaagatttattatatttatttttttattttcgtatatttttgaaatttttaataataaaatgtttaaagtattgtttttgagttggattattgtaattattttttattacgttattttttttttatttttgtttattatggtttggtttttttattattgttagaacgattagtgtaagacgtaatttcgattatattttttttttattgagaattttattatggattttcgttgttttttgcgtaaaagttaatttttttataacggtttataaggttttgtattatcgggttttttatttttttttttttaattgtgttttttttttttattttgttttagttatagtgattttcgtgttatttttttaatgtgttaggagagtttatttatttttagattatagaaatagtatgacgataggtagatgttgttttgtaaaacgagtaaataggtatatgaaattagatatttagttgttaaattatatgtgaggtattttcgaagaatttaacgatttcgatagagcgtagttaagtttggtgaatagaatatgtttttgaattagaggagtttttatataaggagtagggttagatttcgtagtggaggaggagggaggagtagaaatagtttagttcgtcgtttaagtaatttgggttttgaatcggttcgttttggttagtgttttagaagcgcggagtaggaacgggttggggtttaaaaaagaggggggagtttgaacgttcgggggaagtttcggaggcggcggaacgtttacggatggaattttgtttttggggaaaaggattatatttgttagtagagttcgttagacgtgagaagggtgggagcggcggattgtgaacgttggtagggtttcggcgtttcgagaaagttttagtttcgcggtcgtttttttttattacgttttcggttttcggtgttatagttgtgggattcggaagtaaaaatataagtttcgttttcgagaattcgggaagtcggcgagaagtgtgaggtcgcggtagggtcgtatttcgtttcggagagaagtttgagttcgttaggttttgtaggttcgcggaagttcggtaatgataagtacgtcggttattttgtagggcgttatcgtttatacgttttttcgtttttcggacggcggcgtttagtttcggggcgttcggtcgtttcgtttttttcgggggaggaattaagaagagattgtttaatagggtcggtttgattcgcgaataggcgagggttttcgggggagtggcgcggtagaaggtttcgtttaggagtcgagggatagtttagaggaggcgtggttacgttgtcggcggaagtggagtttttcgcgagcgcgcgaggtcgtcggggtaggcggggaaatcggatagtaggggcggggtcgggtcggcgatggggatgcgggagtattacgcggagttgtattcgtgttcgtcggaattggggatgtagagtagcggtagcgggtatggtaggtagtcggcgggtcggtttttagcgtaggtgttcgagaggtaggggttggtttgggatgcgcgcgtatttgttttcgtttcgtttcgttcgtacgaggggtggtggtcgaggtttcgtttcgtacgtttcgtttgaggcgggttcgtttagtttaggcgttcgttttcgttttcgtcgattaaatgggtcggcggggtttagttttcggaaacggtcgtatatttcggggttgcgagcgcggagggcgacgacgacgaagcgtaggtaatcggtcgggcgggcgtcgcgtaggcggaggagcgtattgtttcgcgttgcgtcgcgcggcggtaaaatatacgttgtttgttgtgtttgagaatcgagtagaatcgagagggttttaattaatttttttatatttcgtatttttttttttgagtttttgagatttcgagagcgaaggggatttgtcgatcggggttatttagtttggtaaggggagggttggagttgaattttagtatttgtattattttttatgttttaggttattgtggagttttcgttatagtcgggaatgagatggttttgggtacgtagttttatgttttataaggattttattcggttgtttagaattgatgttgtagtcggaatatattaatgttttgagtaattttgtaatgtatattttgaatgaaggttgtttaggagagagtggttggagtttagagttagtagtttttaatttattaattattttttaatgtttagtcgtttataaggagtgatttgggtaattaggtgttattttggtgtgagattttagaggaatttttaagaaaggggttaattttttaatgtttttttgtttttttgttttgttaacgagttttttttttattaga

SEQ ID NO: 2110 - DNA, 3343 bp, Artificial Sequence
  chemically treated genomic DNA (Homo sapiens)
tttggtggaagaaaggttcgttaataaggtagaagaataggagagtattgagaagttagttttttttttgagagtttttttggggttttatattagggtgatatttgattgtttaaattattttttgtgaacggttgggtattggggagtggttgatgggttagaaattgttggttttgggttttagttatttttttttaggtagtttttatttagggtgtatattataaaattatttaaagtattggtgtatttcgattatagtattaattttggataatcgagtaaaatttttgtggggtatggaattgcgtgtttaggattattttattttcgattgtagcgggaattttataatgatttggagtatgggagatggtgtagatgttggagtttagttttagttttttttttgttaagttgggtgatttcggtcggtaagtttttttcgttttcggggttttaggggtttaagagaggaggtgcggggtataaagggattggttaagattttttcgattttgttcggtttttaagtataataaatagcgtgtattttatcgtcgcgcggcgtagcgcgggatagtacgttttttcgtttgcgcggcgttcgttcggtcggttatttgcgtttcgtcgtcgtcgtttttcgcgttcgtagtttcgaagtgtacgatcgttttcgggggttgagtttcgtcggtttatttaatcggcgggggcgggggcgggcgtttgggttgagcggattcgttttaggcgaggcgtgcggggcggggtttcggttattatttttcgtgcgggcggggcggggcgagggtaggtgcgcgcgtattttaggttagtttttgtttttcgggtatttgcgttggaggtcggttcgtcggttgtttgttatattcgttgtcgttgttttgtatttttaatttcggcgggtacgggtgtagtttcgcgtagtgttttcgtatttttatcgtcggttcggtttcgtttttattgttcggttttttcgtttgtttcggcggtttcgcgcgttcgcggagggttttattttcgtcggtagcgtggttacgttttttttgggttgtttttcggtttttgggcggggttttttgtcgcgttattttttcgggaattttcgtttgttcgcgggttaagtcggttttattgggtagtttttttttgatttttttttcggagagggcggggcggtcgagcgtttcgaggttagacgtcgtcgttcgagagacgagggggcgtgtaggcggtgacgttttgtaaagtggtcggcgtgtttattattatcgagttttcgcgggtttgtagagtttggcggatttagattttttttcggagcgggatgcggttttatcgcggttttatatttttcgtcggtttttcgagttttcgggggcggggtttgtgtttttattttcggattttatagttatgatatcggaagtcggaagcgtggtagggaagggcgatcgcgaaattgggattttttcggagcgtcggggttttattagcgtttatagttcgtcgtttttattttttttacgtttgacggattttgttgataggtgtggtttttttttttaaagatagggttttattcgtgggcgtttcgtcgttttcgaaatttttttcggacgtttaggttttttttttttttttgggttttagttcgtttttgtttcgcgtttttggagtattggttaaggcgggtcgatttaggatttaggttatttgggcggcgagttggattgtttttatttttttttttttttttattgcggggtttgattttattttttgtgtgaggatttttttagtttagagatatattttgtttattaaatttgattgcgttttatcgaggtcgttaaatttttcggaaatgttttatatatagtttggtagttaggtatttgattttatatgtttgtttgttcgttttgtaagataatatttgtttatcgttatattgtttttgtgatttgagaatgaatgggtttttttggtatattagaggaatagtacggaggttattatagttggagtagagtgagggaggggagtatagttggagaggaagggatggggaattcgatggtatagggttttgtaggtcgttgtagggagattggtttttacgtagaaggtaacggggatttatggtagggtttttagtagaggaggaatgtgatcggaattacgttttatattgatcgttttagtagtggtggggagattagattatagtgggtaagggtaaaagaagggtggcgtggtaagaggtaattgtagtaatttagtttagagatagtgttttgagtattttattattggaaattttaaaaatgtacgaaagtagaaaaatgagtatagtaaatttttttggtttgtttgtttttgagagatggagtttcgttttgtcgtttaggttggagtgtagtggtatgattttagtttattttaattttttttttttgggtttaagcgatttttttgttttagttttttaggtagttgggattgtaggcgtgcgttattacgtttagttaatttttgtatttttagtagagacggggttttattatatgttggttagtttggttttgaatttttgattttaggtgatttgtttgttttagatttttaaagtgttgggattataggtgtgagttattgcgttcggttagtatagtaaattttatatttatagttattaattttaataattgaaggtattaatttttgattaattttgtttatatttttcgtaatttttttttattattattttattttttttttttttttttttttttttttttttttttttgagatagaatttcgttttgttattaggttggagtgtagtggtgtgatttttatttattgtaattttcgttttttggatttaagcgatttttttgttttagtcgttgggattatagttgtgtattattacgtttagttaatttttgtatttttagtagagatggggttttattatgttggttaggatggttttgattttttgattttgttattcgttcgtttcggttttttaaagtgttgggattataggtatgagttatcgcgttcggtttttttttttgagatttagttttattttgtcgtttagaatggagtgtagtggtacgattttggtttatcgtaatttttattttttaggtttgagcgatttttttgttttagttttttaaatagttgggattataggtatgtattattatttttagttattttttttttttttgtatttttggtaaatatagggttttgttatgttggttaggttggttttgaattt

SEQ ID NO: 2111 - DNA, 7924 bp, Artificial Sequence
  chemically treated genomic DNA (Homo sapiens)
ggtgtttttttttttttttttatttttattgttttttatgtgttatgggtttgtttttttagtgatttgcgaaagtggagtatcgaggtaggagggaaacggtaattagggagttttcgagtttggggttgttttatttttatttatttttcgattagagttttgtttttgtttggttgttcgtttgtttttttggggaattgagtttagaggtaggtgttttagagaaggaaataaaatgaggggtggtagggataaaaagttatttttattttttattttttatgtagtatgaatataatttttttttatttggtttttaaatttaaagatgtggattaaggtttgtgggtattttaggggtaaggagagttttggggttagtgatattgttaggttaattatgtattttataaaggggagtatttggaaatgaaggattagtttttatgtattaggttaagagtaagggagagttggttagggatagtagtttgtatagtagaggggaatgtagtaatagtagggttttttaggttttattttttattttttaggtaagaagagtatttttttagatttttaggcggaggattgagtttagtttttagtaattaaggtttttttgggatttaaagtttatgggagaagggtaaagattttatgggaagagagaaggaaggttttgggtagaaacgtttggtgttgttttttttggtttttaagataaagcgtttattttgttttttattttttgataggtttgagggtttgttaattatattgtggttataggtggagggaagaggatttttttttttagagtgttatgtttaggaagtttttttaattttatatggtttaagagtagttcgtaggaggttttttaaagacggaataagtaatttattagttttattggggtttttgtttatcgttttaaggtgggcgaggtttaggaagagggttatttttaagttatatattagttgtattgcgtggttgtagttaaaataaagaattgggtgttgagtatttattaattaagaattaaaatttagggtatttatatgtgaaggataagaattttatttttttatttttttaaaaagaagtggggaaagaattattaaatttttttttttgatttattaaattaggaaaatagtaggagagggtggtttaggatttagggatagggtatagtttagatggtggaaagtaaaggagagtaggaagttgtaaattattggttaatgagaaaaggagatagttaattttaggatgaagttgtgattaggttggagttgtttttttgaagatgggattttttgggtattaagatttatgttatattatattggggttagggaagtaggtgatgttagtttttaagtttgtttttagttagggatttgagaagttatattgggtagtggttttaatttgtggattagtattttagttttttttgaagattaggtagggtgttatttattgttttttttttttagtttttttaggaaagaaggattatatttgtattgtattttaggggttttggaagggaaaatatggaattaggattttatagattgataggttttatttataagggttatgattgggaaaaggtatgggagtagaaggagaattgggattttagggtgtagttacgtttattttaaatttttggtggtttggggtatgttttgaggtttagattgttaattaggttttgttggtttgtttattcgttattatttttgtatttgttgttttgagattttatttagttttaggtacgttatttgtttttgagtttttattatttttttgtgacgggtgaatttcgtgtattgtgtttcgggtttatatatgaattgtgagtagggtttatttattttaaatatagatgtttataaaataaagattattttaaattatcggtgtggttgtttggatgagtttttgggggtaggttttatttagattttggtagtgatgtgggagggagagaggtagtgttggtagaagtagttttagaagtaaaggtaatagtagtagagtgattacggaagcggtaaatattgtttttttttttttattttttttagtgttatttgtagggaggtttaaagtaaagtttcgttgttttgtattgggttggtattgtagaaataagatgaaatatagttatcgagaggatgttgaatatttatgagtaggttttaaagttaagatgagttttatttgtttgtgtgggttaggaacgggtttttttgaaggtatgaggtgggattggataattttttagatttgtgattggatatttcgggggagtagaggtagattgggattttaggattgtaggtattttatattttgggatatggaattgatggaggtggagaatattggggataaggattgaatgaagaaaggagtaggataacgtaggataatagtagttttaagatttttattatattttattcggtattagtgatagataaatttttttgattttaattattatcgtgtgagatggggagggtggttatttatttaggttttataggtaaggaaatagatgattagagaatttaaagatttggtcgggtgtagtggtttatgtttgtaattttaattttgggaggtcgaggtaggaggattgtttgagtttaagagtttgggattagtttgggtaatatagtgagatattgtttttagaaaaaattagttgagtgtggtggtttgtgaggttgaggttagtggattatttgagtttagaaggttaaggttgtagttgtattattgtatttttgtttgggtgatagagaaagattttgttttaataaaaagagtttaaagatttgtttaagggttcgaagtaatagtggtagaattgtggttgtaaattattgaattggaattattggagggtaaagttttggtatttttagaaaaatttttataaataatttttatttgtagttagaattaagaattattaatttaggttttttgtttaagttagtgttgtgtttagagtaagtattgttttatagaaagttataagaattatacgttgtttagtgtatgtttaaagttgtaagtttttggaaagcgaggttagtttgaggtaaatttggagatagagatattttaggagagttttattaagtatattttattaggaaaggtgagaattttgggagtttgaagggtttaaggttatattaggagaaaagggatggtatgtatttaaggaagagggaatttttatattttttattttgggaatttttatggtttttttgaagaaggtttgtaaaagagtagagaataagaggtgtttttggaggtttagagagtattagggggaagttttaggtatgtatataaattcggtaagttatagttttgtttattattagtgttaagtttttgtgatttagtggtttggtggggatttttttttattggttgtttttaggaattttatttagttttagtaggggatatatttttttttatattttttgttattttttttgtttatttaggtaatggaaatttgtttttagggagtagttagttgagatatatggtttttgtatatttgaatagttatggaaaagttgtaaggtagtttggcgttttttggtgataattattttattttattttaataaattagatttttaagattagttgtttttcggatttgtttattttttgttttaaggagatagtttttaatggatgtgtttttgtgaaaatattttagtaaatatttgttttgttattgaaattttattttaaaattttaaagttaggttaagttttattgttagttttattgatgaagaaattaaggtatttttaaaagagtaatttgttgagttggcgggtgtttgggttttttcggtttttgtggtttttaggggtgggtttttgagatggtttttagtagatgttttgcgatgtattgtacgttttttgttgaaagtattaggggtgatttgtttgcgtttggaattatagtagttttaattttttttatatatttttttttgtgggaaggtgattagtataaattcgttttgaaaagttttggggattaaatttttgtttgagaggaaggtaggtgtagtttatttattaagtttatttatttgttttgtgatttttttttattatttttttagtaacgattgagttttatgatttgggggttgggggatgaggtggaggtgggggatataatataggagatggtatagtgtaggggtagaggttggtgtgttttttaggataagtggtattacgtattgaaagattttttaagataaatataattttgtttttttagtttggtaagagttgaggtattgaaaatttttttttttttttagaaaatgatatattttttttttaagggtttttttgattttgttttggtggaaagtaataaagagaagaacgtgaataggaatatgtatattttagttgttatttgagttttatggataggaggtttaatttttttttttattttttagattttcgtagattttgtttttttattgtataatttagagattgatatttagtaggtatttaataaacgtttgtgttaaatgagaataatttgatggggtaagtaggagttaattttgtattttttttttttttttttttttttttattcgatttttagggttttggttttttgtaagtagtgaattatttatttttgtttatagatattaaattggttttttttaggttgtagtagggtggggcggggaggcggttttgtttagtttgttaataggaggagtaatttttttgtttaaatagtatttataggtggggatttgtttttgttaagttattttggggatgtttaaagttttattgttagattttttttgtttttttttttggttttttttttttttttatttttttaataggtttataagtgggtttaggtttttttgcggggtttattttgcgttttattatggtttttattgttaagtttttttatgattttagtgttattagtttggatggggagaaggtagattttaatacgtttcggggtagggtcgtgttgattgagaatgtggtttcgttttgaggtataattattcgggattttatttagtttaacgagttgtaatgtcgtttttttaggcgtttggtggtttttggttttttttgtaattaatttggatattaggtgaggggtttttttttgtaatgtattaaaagtgttgggttggtgtagtttaggtgggataaaaggagaggttgaatgattatgttttggagtgtttggaataatggggtatgttttgttaagttaggtttttaggtgtatgtgatatattaagagaaggtatatattttttaagattaaatattgaggttgtgtgatttttatagtttattgtttttttattatattattttatgagggttggttttaggtttgtgtttttttttattgtgtttttagtgtttagggtatagaaagtatttattaaatatttgttgaataaatgagtggagaaagtagaggttaggaattaaataagaattggatagatttaagagattttagttttagttggatttggttttgttatttaatggttttgtgttttcggaaagggcgttttatttttcggtttagtttttttatttgtaaattggggataatattatttagtttataggattattatgatgtttaggggataggatatataaaagtaatttgaaaaatataaagtattatgtaaatgtaagtaaattgttatttagattgaggatgatttttgttggtttaaattagttaagtggaaagaaaataagtaggaaagagaaaggtttttaaaaggtacgtgtttttgggtattatatgtatttatttttgattaatgggttaagttgttatagatttttagtttatatatttcgagtttttttttagggatttttttatttttatttatgattttaacgtataagtagggagaatgaatttaagcgaattttttcgttataatttttttagtttaatttatagtggtatgaaggtgaggaagataggaaagtaggaaggttgaagtattattggttgtgataaatttgagtttaaattgtttattgtttttattgtttttttttaagttttttgtttggttttttttagagtaggagagatagaagtagtaaattttttttcgagatgtttttttagttttagaagtatttttagttttatattatttttttagtttagtaagttgttggagggagtttataatttattaggagttagttagttatttgtattaagaaatagaaatttgttagggtatagtggtttatatttataattttagcgttttgggaggttaaggtaggtagattgtttgagtttaggagtttaagattagtttgagtaatatggtgaaattttgtttttataaaaaattgtaaaaattagttaggtatggtggtatgtgtttgtagttatagttatttgggacgttgaagtagtaggatcgtttgagtttgggaagtcgaggttgtagtgagttatgattgtgttatcgtattttagtttaggtgatagagtgaggttttgttttaggaaaaaaaatagaaataaaaatagagaagtttattagagattagttttgggtttatgatgttatgatggtttggaattgattgaattagttagtttttataggttagaagtaggaatttttttttagaggaaggtatttgtttgttaaattggaaaggtagaggtggaaaagaagggtttttataggttttttggattgttatgaatggtgatgttgagagggaataggatagggatggtagtggggagggaaaggtagggattaggttttgagttaaagtatgcgtagttgagagtagtgagtggataggaggtgtagtagtttttgggtagtagtttatttaagaaaagaatgataattatatatttataatttttagttattaagtatttatttttttaattttttttttttttggtttattgttaaattttaaattttgtattttatttattttatgtttgttggttattaagtagttttatttagagtatatatttattgttgttttgaatttgttttgttgttatggtatttgaaaattagatgtttttggatgggggtttttttttattaaagtttttttttatttgtattttagttttaggataaggtaagaagaaagtaagaagttgtaaattttatttttttgggttttaattttatttttagtttaaggagttgagtaggtagaggtaaaggttatatttaatatacgtgtaattgaaagtaggcgaggtaaaattagggtagaggaaaggaaaggggtgtgtgtgtaggtatggatttatgggtaggtgggtcggtaggttagttgaagaggaggttttaagtagtataatttaagtttttttttttttttttttgttttaaatattttaagaattgtttagggtagattggagataaaagtaatagtttagaagtgttaaattttgaagagtagttaaagtatgggtaataaagtgagattttatttttataaaaaaaaaaaaaaattagtcgggtatggtggtttgtgtttgtagttttagttattaaagaggttgaagtaggaggaatgtttgagtttagaagtttaaggttgtagtgagtaatatttcgtttgttttgttttttttttttttatagtgaaaaagaatgattttggggagggagtgtaggagggtgaaagagttttatgttgtggatttttttttttttttatttattgtttacgtattttgtttttttttttttttagg

SEQ ID NO: 2112 - DNA, 7924 bp, Artificial Sequence
  chemically treated genomic DNA (Homo sapiens)
tttaggggaggaaaaagataaagtgcgtggatagtgggtgggggaagagaaagatttataatatgaaatttttttatttttttatattttttttttagggttatttttttttattgtgaaagagagagagataagatagacgaggtgttgtttattgtagttttgaatttttgggtttaagtattttttttgttttagtttttttagtagttgagattatagatataggttattatgttcggttaatttttttttttttttgtagagatggggttttattttgttgtttatgttttggttgttttttaagatttagtatttttgagttgttgtttttgtttttagtttattttgagtagtttttaaggtgtttgaagtagaagaaagagaaaagaggtttaggttatattgtttagaattttttttttaattaatttatcgatttatttatttataaatttatatttatatatatatttttttttttttttttgttttggttttgtttcgtttgtttttaattgtacgtgtgttgagtatagtttttgtttttgtttatttagttttttgaattgagggtgaaattgagatttagaggaatgggatttatagttttttgttttttttttgttttgttttagaattgaagtataaatgggaagaagttttgatgaaggaagatttttatttaagaatatttagtttttaggtgttataatagtagagtaagtttaaggtaataatgaatgtgtattttaaatggaattatttagtaattaataggtatgaagtaaataggatataggatttagggtttggtaataggttagggggagggggagttgaggaaataagtgtttgatggttaaagattgtgagtatgtaattattattttttttttgagtaggttgttatttaaagattgttgtattttttatttatttattgtttttagttacgtatgttttggtttaaaatttggtttttgtttttttttttttattgttatttttgttttatttttttttagtattattatttatgataatttaaaaggtttatgggaattttttttttttatttttatttttttaatttaatagatagatatttttttttgggagaaagtttttgtttttgatttgtgagaattaattagtttagttagttttaggttattatgatattatgagtttagagttgatttttagtggatttttttgtttttgtttttgtttttttttttgagatagggttttattttgttatttaggttggggtgcggtggtataattatagtttattgtagtttcgattttttaggtttaggcgattttgttattttagcgttttaagtagttgtgattataggtatatgttattatgtttggttaatttttgtaattttttgtagaaataaggttttattatgttgtttaggttaattttgaatttttgagtttaagtaatttgtttattttagttttttaaagcgttgggattataggtgtgagttattgtattttggtagatttttattttttgatataaatggttggttggtttttggtaggttatagattttttttagtaatttgttaggttgaagagatggtgtgaggttggaggtatttttggggttggagggatatttcgaaagagggtttgttatttttgttttttttgttttagaaaaggttagatagaaaatttagggaagaatagtgagagtagtgaatagtttgggtttaggtttgttatagttagtgatgttttagtttttttgtttttttgttttttttatttttatattattgtgaattgaattaaggggattataacgagagggttcgtttgggtttattttttttgtttgtacgttaaaattataggtggaaatagaagaatttttaaaagagaattcgaggtgtgtgggttgaagatttataatagtttgatttattaattagaaataggtgtatgtaatgtttagaggtacgtgttttttgaaaattttttttttttttgtttattttttttttatttggttaatttaaattaataaaaattatttttaatttaaataatagtttgtttgtatttgtatagtattttatattttttaagttatttttgtatattttgttttttaaatattataataattttatgagttaagtggtattatttttaatttatagatgaggaaattaaatcgaaaaatgaagcgtttttttcgagggtatagagttattaaatagtaaaattaagtttagttagagttaaggttttttgagtttgtttaatttttgtttgatttttggtttttattttttttatttatttatttaataaatatttaatgagtgttttttgtgttttaggtattgaggatatagtggagagaaatatagatttggaattagtttttatggagtaatatagtagaaagatagtaaattataaaaattatatagttttagtgtttaattttaaaaaatatatatttttttttggtatgttatatgtatttaaagatttagtttaataaaatatattttattattttagatattttaaaatatggttatttagtttttttttttattttatttgagttatattaatttaatatttttggtgtattataaggagggattttttatttgatgtttaaattggttgtaagggaagttaaggattattaggcgtttgggaaagcggtattgtagttcgttgagttgggtgaagtttcgggtggttgtgttttagagcgaagttatatttttaattagtacggttttgtttcggaacgtattgaaatttattttttttttatttaggttgatggtattgaggttatagaaggatttggtaatgaaagttatggtgaagcgtagagtgagtttcgtagagaggtttgagtttatttatgagtttattagaggggtggggaggaaggaggagttaggaaggaggatagaaaggatttaataatggagttttgagtatttttaggatgatttagtaaaaataggtttttatttgtaagtgttgtttgaataaggaggttgttttttttattaatagattgaataaggtcgttttttcgttttattttgttgtaatttgggaagggttaatttgatatttatgagtagaggtaaataatttattgtttataggaaattagagttttaaaggtcgaatggagaggaaaaaaagggagggagggatgtaggattgatttttatttgttttattaagttgtttttatttgatatagacgtttattgaatgtttgttgagtgttaatttttgaattgtatagtgagagggtagggtttgcggagatttgaaagatgaagaagagaattgagttttttatttatgggatttagatgataattgaaatatatatatttttgtttacgtttttttttttgttgttttttattaggataaaattaaagggatttttaggaggagagtgtgttattttttaggggaaaaaagaagtttttagtgttttagtttttgttaggttgaagagataaagttgtgtttattttgaaaagttttttagtgcgtggtgttatttgttttggagaatatattagtttttgtttttgtattgtattattttttatattatattttttatttttattttattttttagtttttaagttatgaggtttagtcgttgttgggagaatggtgaagaggagttatagaataggtggataaatttagtggatgaattgtatttattttttttttagatagagatttggtttttaagattttttagagcgggtttgtgttggttatttttttatagaaggaagtgtgtggaggaagttgaagttgttgtggttttagacgtaggtaggttatttttgatgtttttaataagaggcgtgtagtgtatcgtaggatatttgttaagggttattttagaggtttatttttggaagttatagaaatcgaaaagatttaagtattcgttaatttaataagttatttttttaaaaatgttttgatttttttattagtaaaattagtaatggggtttgatttagttttgggattttagagtgaaattttaataataaagtaaatgtttattagggtgtttttataggggtatatttattgggaattgtttttttggaataaagaataagtaagttcggggagtagttggttttgagaatttgatttgttgagatgagatgaagtaattattattagggagcgttaagttgttttgtagtttttttatggttgtttaagtatatagggattatgtgttttagttggttgttttttaaaaataagtttttattatttaagtggatagaaggagtgataggaagtgtagagggaagtgtgttttttgttgaagttgggtggagtttttagaagtaattaataagaaagagtttttattaagttattgagttataaggatttggtattgatagtgggtagaattgtaatttgtcggatttatgtgtatatttagagtttttttttagtattttttgggtttttagagatattttttattttttgtttttttgtaagttttttttaagaaggttatgggagtttttaagatgaggagtgtgggggtttttttttttttaggtatatgttatttttttttttttggtgtgattttggattttttagatttttagggtttttattttttttaatggaatatatttggtgaggtttttttaaaatatttttgtttttaaatttattttaaattggtttcgttttttaaaagtttataattttaagtatatattaagtagcgtatgatttttatggttttttgtgggatagtgtttgttttggatatagtattggtttaggtagaaagtttgggttggtggtttttaattttgattgtaaatgagaattgtttgtaggaatttttttagagatgttaaagttttgttttttagtgattttaatttagtggtttataattataattttgttattgttatttcggatttttaggtaaatttttaagttttttttattgagatagggtttttttttgttatttaggtaggagtgtaatggtgtaattgtagttttgattttttgggtttaagtgatttattggttttagttttataagttattatatttagttaattttttttagagatagtgttttattatgttgtttaggttggttttaaatttttgggtttaagtagtttttttgtttcggttttttagagttgggattataggtatgagttattgtattcggttaaatttttaagttttttgattatttgtttttttgtttgtgggatttgggtagataattattttttttattttatacggtgatggttagggttagaagagtttatttattattagtgtcgggtaaagtgtagtgaaaattttaagattattgttgttttgcgttgttttatttttttttttatttagtttttatttttaatattttttatttttattaattttatattttaaagtatgaaatatttgtagttttgagattttagtttgtttttgttttttcgaggtatttaattataaatttgaaagattatttagttttattttatgtttttaggaagattcgtttttgatttatataaatagatgagatttattttggttttaaaatttgtttatagatgtttagtattttttcgataattgtgttttattttatttttgtagtgttagtttaatgtagggtaacggggttttgttttgggtttttttgtaggtggtattagggaaggtagagaagggaagataatgtttgtcgttttcgtggttattttattgttgttgtttttgtttttggagttgtttttattagtattgttttttttttttttatattattgttagggtttgagtgagatttatttttaaggatttatttaggtagttatatcggtggtttgaaataatttttattttgtaaatatttgtgtttaaaatagatgaattttgtttataatttatatatggattcgagatatagtatacgaagtttattcgttatagggagatagtggaggtttaggagtaggtggcgtgtttggggttggatggagttttaagatagtaggtgtagaggtggtgacgagtaaataggttagtagagtttggttaatagtttgggttttaagatatgttttaggttattaaaagtttagggtgagcgtagttgtattttaaaattttaattttttttttgtttttatatttttttttagttatggtttttgtggatagggtttattagtttatagaattttgattttatgtttttttttttagaatttttagggtatagtataaatatagttttttttttttgagggggttaggagagaaagataatgaatggtattttgtttgatttttagggaaagttgaaatattggtttatagattggagttattgtttaatataattttttaagtttttggttgaagatagatttgagggttggtattatttatttttttagttttagtgtgatgtggtataggttttgatatttaaggagttttatttttaaggaagtaattttagtttagttatagttttattttagagttagttgttttttttttttattagttagtgatttataattttttgtttttttttgttttttattatttaagttatattttgtttttaagttttgagttatttttttttgttgtttttttggtttggtaagttaggaggaaaggtttgatggttttttttttatttttttttggaggagtaaggaagtgaggtttttattttttatatatgagtgttttggattttggtttttagttgatgaatatttaatatttagttttttgttttggttgtagttacgtagtgtagttaatgtgtggtttaagaatgattttttttttaggtttcgtttattttgggacggtgggtaggaattttagtagaattggtaaattatttgtttcgtttttaaagggttttttacgagttatttttgggttatatggggttaaagaaattttttgaatatagtattttggaggaaggagtttttttttttttatttgtagttatagtgtggttggtaaatttttaagtttattaggaggtagagggtaagatgagcgttttgttttaaaggttaaagagaatagtattaagcgtttttatttagggttttttttttttttttttatgaagtttttgttttttttttataaattttgggttttaggagaattttggttgttgaaggttaggtttagtttttcgtttgggagtttgaggaaatgttttttttatttaagaaatggaagatggggtttaggaggttttgttgttgttatatttttttttgttgtgtaaattgttgtttttggttagtttttttttgtttttaatttgatatataggagttagttttttatttttaaatgtttttttttgtggagtgtatggttggtttgatagtgttattgattttagggttttttttgtttttggagtatttataggttttggtttatatttttaaatttgggagttaggtggagagaaattgtgtttatgttgtatgggaggtagagaatggaggtgattttttatttttgttattttttattttgtttttttttttgaagtatttgtttttgagtttagttttttaaagaggtaggcgggtagttaagtaagggtaaagttttggtcggggaatgggtagaggtagggtagttttaggttcgaggattttttggttgtcgttttttttttatttcgatgttttattttcgtaggttattggggaggtaggtttatggtatatgagggatagtgggggtgggggaagaggaagaagtatt

SEQ ID NO: 2113 - DNA, 15698 bp, Artificial Sequence
  chemically treated genomic DNA (Homo sapiens)
ggaattttaggttaggttggaatgataattgtatatagttatttgggttttttttttttagtttttattattttaggatgtggtttttatgtagatgatttaaaatggttgtttaagttttagttaatatattttattttagggagtaggaaaaaggtgtgtttttttttttattttatgtgatttttttttagaagtattatttattatttttgtttgtatttttttggttagtatttatttagttatatggttatagttagttgaaggaaggatagggattgttatatattagttaagaggtaaattgtttagataaaaaggtttttaaagaaggttagagcggttgttagggtgtaattttattatttattgttatgggacgaattgtgttttttatttaggttgatgttttaagttttagaattttagaatgggattgtatttggagataggttttttaaggaggtaaggaggttaaaatgagattattagggtgggttataattcgattgatgttttataagaagagattaggatacggatatgtttagagggacggttacgtgaggatattaagaaaggtagttgtttgtaagttaaggatagggtttaggggaaattaattttgttaatatttttatttcggatttttagtttttaggattatgagaagatatatttttgttgtttaagttgttcggtttgtggtattttgttatggtagtttaagtaaataaatatagttatttgttgttggaataaattattttagtattgtggtttggtagtatatatgtttagttatagagttatatgtagttacgtgtagagttatatgtatcgttatacgttttgtgggttaggaatttggatttagtttaattagttttatttttcgttagggtttagttaaatattagttgttttttatttgagagtttagtcggggaagggtttttttttaattttacgtggtgttggtaggatttagttttttatggtttgttggattgagaattttagtttttattgtttgttggttagaggtcgtttttatgttttcgttatgtgggtttttttaatatggtagttgattttattagagtatttatgttaagaaggtaatagagagggttagggagattgaagttatatttttttgcgatttagttatggggtgatattttattatttttgtttattggttagaagtaggttattaggtatagtttaagtttacggggaggggttatataagggtgttaatattaggaggtgaggggtgttggggttattttatgagtttgtttattgaggtaattaataattttgaggtttgatatagtggataaaggtttttattaatagtagagaattgggaattttatttatttatttatttttgagatagagttttatttttgttatttaggttggagtgtaatggtatgattttggtttattgtaatttttattttttaggtttaagtaattttgttttagttttcggaatagttgggattataggtatgtattattatattcggttaatttttgtatttttagtagagatagggtttcgttatgttggttaggttggtttcgaatttttgatttttggtgatttgtttgttttggttttttaaagtgttgggattataggcgtgagttatcgtatttcgttggaatttaatttttttagagatagtgtcgttttattatttaagttggagtgtagtggtgtaattttagtttatttgtagttttaaatttttgggtttaggtgatttttttatattagttttttaagaattgggaattaatagttgtttttttgttgttttttttaagaaaagggaggttattgttattttattggggataatgttgggtttttttttaggataggttttgagataaggcggaggtgttgtttgtggttatagagtaggggattttgggttgtaggtgtggtttggttaaagtaggttttattgggtttttttttgtttgtattatttttcggttgggcggttgtttttgaggttaattttattttttgttgggtaggttggatagttgtttttttcgtttgtttttttattatttaaaaggtaggaggttttggagattaggattttgttcgttacggtttgtgttttaggcgtgagggggtgttttatagatttttgttgagttgttgttgaatgacgttttttgggggttttgtcggaaggttagagtaggggtgtatttttataaagaaacgtttttaggtcgggatttatttttgtgggcggtattttgtggttatagttgtttttcgttgtattaattatagtgtttttgtgggtagtaggcgttgattatttaggtttgttttagatttttttttttttttcggggcgttgcgttgggatcgatggggggcgttaggtttgtggatatcgttttgtaggggtttttttagtttattgggggtggggtgggggttatatttggggtttttaggtcgtgtcgattacgcgtattttttgcgttttgcgtaggagttcgtttatttttttttcgtgtagagagtttcgtagttggtttttcgtagggttgttcgggtgagtatggttttggttacgggttagtgtggcgggagggtaaattttaaggttatttcggtttagagtttacggtcggttgtcgtttcgttttaggcgtcggcgggggatttttttcgtatgggtttgcgttcgcgttcggcgttttttttacggtttcgtttcgtttatggtttcgttttttatgggcgagtttttttatggttttgttttttcgcgttttatttttttttcgttttattttttatttttttgtttcgtttttagtttttttaatttttatcggttagtttttttttttatttcgttcgttttttagtcgtttcgttttttagtcggtttgtttaatgttttcgtttttagtatcgtttcgtttcgttttcgtttcgtttcgttttttaggcggtttttttgttgtgtttcgtttcggtttcgttacgtttttattttattacgtttttcgtatcgttacgtttttcgtatcgttacgttttttttattatgtagtttcgtttcgtttttttttcgtttcgtttcgtcgcgatattttatatatagtttcgttttattttattatagttttattacgtttcgtttttttttcgttgagtttcgcgttttcgttcgggtggggcgttgcgttgttagcggttttgttgtgtgaggtagaatttgcgggggtaggggcgggttggttttttggttagttattggtagagttcgtaggttagggttgttaattatgttggtcggcgtggtttcgttttcgtcggcgcggtttcgttttcgtcggcgtagcgtttgggacgtaaggcgtcgtgggggttgtcgggacgggtttaagatggacggtcgtttaggttttgtttttatttgcggtttagagttttatttattgtttcggtgttgagcggcgtcgcgagtcggttcgaggttttcggggattgtcgtgtcgggcgggagatcgttatggcgattttggaaaagttgatgaaggttttcgagttttttaagtttttttagtagtagtagtagtagtagtagtagtagtagtagtagtagtagtagtagtagtagtaatagtcgttatcgtcgtcgtcgtcgtcgtcgtttttttagtttttttagtcgtcgtcgtaggtatagtcgttgttgttttagtcgtagtcgttttcgtcgtcgttttcgtcgttattcggttcggttgtggttgaggagtcgttgtatcgatcgtgagtttgggttcgttgtagttttttgtttcggcgggttttaggttacggcggggatggcggtaattttgtagtttgcgggtcggcgatacgaattttcggtttcgtagagatagagtgatttagtaatttagagtttatgagggatattcgtttttttttggggcgaggtttttttttattttagtttcgtttttttatttgggtttttttttgttttttcgcgaggggaggtagagttttgttggggtttgttttgaatttatcgaggggagttacggttttagttttttcgtttttcgtaggatgcgaagagttggggcgagaatttgtttttttttatttgcgagaaattagggcgggggtttttttaattgcgttgtgaagagaatttggaggagtcgagatttgtttagtgttattttttttttttagtttgagagggaagagggttgggggcgcgggatatttcgagaggaggcggggtttggagttggagagatgtgggggtagtggatgatataatgtttttaggacgtttcggcgggagtggcggggtagggggggggcggggagtgagggcgcgtttaatgggagatttttttttttagtggtatttaaaatagtttgagatttgaggttttttttatattgttaggatattttatttagtttatgattacggtggtagtaatacgattttaagtattatttaagagatttgtttatttaagtttaagttggtttgtaggcgtttgaatgagttgtggttgttaagtaaagtggtgaatttacgtggtgattaatgaaattattttaaatattaggaagagttgattgaagttttttgtttatgtgtgttgggaataaaattaatacgttgttgatggggaggttaattgtcgagggatgaatgaggtgtatattttattagtattttagttaggtttgttagaatacggggggttcgtagatttcgtgggtattttagatgtgttagtgaaagggtttttgtttgttttattgttgatagtttgttattttttggaagttaggggtttttgttgtttgtttttggggagaatttttgaaataggaaaagagagattattaaaatatttagcggaattttaggattttttttggaagtttgtgtgtcgagtgtatagtaggagttaggaagtattttggtgtagtttaggttttttttttattttttagtattttattttcgatttggatgtgttttagatggtatttggtaagaatatttttgttaagattgattaatttttagtaatattttttgttttttgtttttgttatgatttttgtttcgtttttaaagtttaattagaaaatgattcggagagtagtgttagtttatttgttggaataaaatttaggaataaattattttaaaggatggaaaaattttttggatatttggagaaattttaaaataatttggtttatttttttagtaagtaattttttatttagaaatttattgtagtgtttttttaggaggtaggtgttataaaagtttatatattgtatgtattttgtgtaaatattaaatagggtttttgatgggaaggaagatttttttgttgggttgttttagatatttgattattttaaaaatatgtttttttttttttatgttgatttgatagaatttgtatttgtttatttttaaaatatgggtattaagaaattttttttgttgttttgataaaggagatagattttgttttattattttaaggtaatatatgattattttatttaaaaaatttaattaggattggtaaggtggtttatatttttaattcgagtattttgggaggtttaggtggacgaattatttgaggttaggagtttgagattagtttggttaatatggtgaaattttgtttttattaaaaatataaaaattagttggttatggtggtacgtgtttgtaatttaagttatttgggaggttgaggtaggaaaatcgtttgaattcgggaggtagagtttgtagtgagttgagattacgttattgtattttagtttgggtgatagagcgagattttattttaaaaaaaattttttttaatgtattatttttgtataagtaatatattgatatgatataaattttgtaattataaaagggtaataattaaaatattttttttttattttttttttttgagtatttaattttgtttttaagaataagtattattttagttttttatgtattttgttagatataatttgtttatattgtaagatagatttaaaatgttttaaaaataaaagtagtttagaataatatatatttatatattttttgagatgtagttttatattgttatttaggttggagtgtagtgatataatttcggtttattgtagtttttgttttttaggtttaaatgttttttttgttttagttttttgagtagttgggattataggcgtttattattatgtttagttaatttttgtatttttagtagagatggggttttattatgttggttaggttggttttgaatttttgattttgtgatttgtttatttcggttttttaaagtgttgggattataggtgtgagttattatgtttggttagaataataatttttaaaggtttttagtatgttttgaaattaattgtattaggtttatttatagttttatagttattttaaataaaatgtatatttgttatatttttttgtattttgttgttgagaaaggaggtatttattaattttgagtaataaatattgtttataaagtttggattttggtagttttgtttacgtgttttagttaaaaaattttttttttaaagtaagattgatgaaagtaatttagaaagtatttgttttgtttttatggtttttgttttttggtgtggaattgtggtgttacgttatgtatgggttttagtttatgagtgtttgtgttttgtttagtatataggatgtaggagttttttatggggttggttgtaggtttagtaaatttagtatgtttgggagggtttttatagtaattaggaggtaattaatatttgtttttggtagttttttatttttttttagatttttatttggtgtttttttgattttatttatttattagtaaatatttattaaatatgtattatgtgtttggtattgttataggtgtagggtttagtagtgagtagataaagttttgttttcgtgaagtttttattttaatgaaggatatagatagtaagtaagatagataagtaaaatatatagtacgttaatacgtggaggaattttaaagtagggaaggggatagggaaatgttagggttaatcgagtgttaatttatttttatttttaaaaaaattgttaagggttttttagtaaaatttagaaagtttgttagataaattttaaaagagttgtagtattaagtgttgatatttttattttattttgttttgttttgttttttttgagatagtttttgttttattagttaggttggagtgtattagtgtgattttggtttattgtaatttttgttttttgggtttaagtgatttttatgttttagttttttgtttagttgggattatagatatgtattgttatgtttgggtaattttttttttttttttcgagacggagttttgttttgtcgtttaggttggagtgtagtggcgcgattttagtttattgtaagtttcgtttttcgagtttacgttatttttttgttttagttttttaagtagttgggattataggcgtttgttattacgtttagttaatttttttgtatttttaatagagacggggttttatcgtgttagttaggatgattttgattttttgatttcgttattcgtcgattttgtgattcgtttatttcggttttttaaagtgttgggattataggtatgagttattgtgttcggttacgtttgggtaatttttgtatttttagtagagatggggttttgttatgatgagtaggttggtttcgaattttcggttttatgtgatttgtttgttttggttttttaaagtgttaggattataggtatgagttattatatttggttagtgttgatattttaaatacggtgtttagggaaggtttattgagaagatagttttttttttttttttttttggggttggggggtaaggttttgttttttaatttaggttggaatgtagtattattatcgtagtttattttagttttgaatttttgggtttaagtgatttttttattttaattttataatgtgttgggattataggtgtgagttattatatttggttagatgatggtttttgagtaaagattttaagcgagttaagagtttagtgtaagggtgtatgaagtagtggtattttagatggggggaataggtttaaaatttttttgttttaggaatagtaaggatgttattttagttgggtgaattgagtgagggggatatttgtagtaagaagtaaggtttaagaggttaagggagtgttatattagattaatattatttgttttgtagatggaataaagatattggtatttatgtgagtgagatgggatgttattggaggattagagtagaggagtagtatgatttgaattttaattttaagtgaattttggttgataatagagtgaaggggaatatcggtaaaagtagaaattagttaggaagttattgtagtgtttagataagtatggtgggttttgttagggtatcggttgtcggttgtgggtagtgtgaggaatgattgattggattttgaatgcggaattaattgtatttgttgaattttgttaagtataataatttagtagtagtttgcgttattaggtttgtatttagttgtaagtaatagaaaattttgttgtaatagtttaaattggtaataagtaagagtttattagaagataaaaataagtttggggaaatttaataataagttaaggaatttaggtttttttttttttttttttttgaaacggagtttcgtttttgttattcgggttggagtgtaatgatgtgattttagtttattaaaatttttattttttgggtttaagtgatttttttgttttagttttttaagtaattgggattataggcgtatattattatgtttagttaatttttgtgtttttagtagagatggggttttattatgttggttaggttggtttcgaatttttgattttaggtgatttattcgttttagtttgttaaagtgttgggattataggtttgggttattgtattcggttagaatttaggtttttttttatatttattttgtaaatttttgtttttattttttttttttgtatttttattgttgaattgtaatagttttttatatattttggatattggatttttattagatagatgatttgtaaaaattttttttttttttggattgtttttttatttttttgatagtgttttttgaagtgtaaaagtttttaattttgatgaagtcgagtttatttattttgtttttggttgttgtgttttaagtgttatatttaagaaattattgtttaatttaaagttaaaaaggtttatttttatgtttttttttaagaattttagagttttatatttaagtttgatttattttgagttaatttttatatatggtttaggtagaagtttaattttatttttttttatgtggttatttagttgttttagtattgtttgttgaagagattattttttttttatggaattattttagtatttttgttgaaaattaatcgtttttaattgtataaatttatttttagattgttagttttatttgttggtttttatgtcgattttgtgttagtattatatagttttgattattgaagtttgtgttatagtttaaatttatgaaatgtgagttttttaattttgtttttttttaagattgatttggttatgttgggttttttgtattttcgtacgaattgtaggattagtttgttagttttaataaagaagttaagtaggattttgagagggattgtgttgaatttgtagattaatttggggagtattcgtattttaataatattgttttttatttatgaatatgggtaaattttgtgtaaatggttagattgtaagtatttcgggttgtgtgggtatagtgtttttgttatagttacgcggttttgttattgtagtatgaaagtagttataagtaatatgtatgagtgtttgtgttttaatagaattttattaatgataaggaagtttgaattttatataatttttatttgttatgagatagtatttgattattttggttaattatttaaaaatgtaaaaatattttttagtttgtgaattagttaaaaatatgtaggttatagtttttttatttttaggttaaaatatgataggattatatttggaaagtatttttttttttttttttttttttttttttgagacggagttttatttttgttgtttaggttggagtgtagtggcgcgatttcggtttattgtaatttttgttttttaggtttaagatatttttttgtacggtttttttagtagttgggattataggtatgcgttattatatttagttaattttgtatttttagtagagacggggtttttttatgttggttaggttggttttgaatttttgattttaggtgatttattcgttttagttttttaaagtgttgggattatagggtgtgagttattatattttgttggaaagtattttttttttggttgtttttgttttttttttaaattagttttgaaaattataaaagttatatatatatattataaaaatatttttaagtagtatagatgaaaaataaagttttttttgtaagtttgttatttttgtttaattttttaagaataaaagtgttttttgtgttttttttttagattttaatatgtatatataagtatttaaatgtgttattttttgtttgtttgattgagattatattatatatgtatttttttatttaataatgtgttatagatattgttttatagtagtatttgtaatttttattaattgttatgtaatattttagaatttttttttaaaagaggatttttggagatgtaaaggtaaaggttttatatttttgtggttgtagaatgtgttggtgatatattttttttattttgagaagtttttatttttattatttttattttttgtaaataagttaattatttgataaattatttttgaatggatttatatttaaaatatttagttttatttagataataaggaggaaaaataaaatattttataaagtattgtttaatattgtattaaattggattaatttgggggttagaatgtatgttagagatatgatatgtttataggtttttgttattatagtgaggttttagggatagtcgtttggtattatttgggattttataagtagattttttttgtttgatttgataaattagagtttgtgttttaataggtttagtgagtgatttatatgtatattggagtttgggaagttttattgtaggtgtttagattttatttttgttgttgttaataataatgtaagtatttgggaggaagatttgtgttgtttatatgtgtttaggtgtagttgaggtggttttgtttatttgttgtagggtcgttgagtatttttgtagttgtgatgagtgagttgaggtgagtttgcggagagtttttagttattggtagtgggattcgtttagatgaattggaaggatttttttatttgagtagttattatggagaaaaataatcgaatgaggggagagataatgtgtaattttatttagggtataaaggagagttgtggttagaaggtgatatttgagtggaaagggggtaagttatgtgtatagcgggagaagagaggtttaggtagagttaatagaaggtagaaatgttttttatgtttgagaattagtaaggaggttagtggttgaagtaaggtgaagggtagaaataaggatgaggttgcgagagatgagaggttagagacgagcgttttgtgtattaagataagtttgtgtggttaaaataagtagtttaatttatgtttttaaaagattattttggttgggtataatggtttatgtttgtaatattagtagtttgagacggtgtggtgggaggattgtttgaggttagacgattagtatagttaatatagtagtatttataaggtttttataaaaaattttaaaaaattagttgggtatagtggtgtgtgtttgtagttttagttatttaggaggttgaggaggttggaggattgtttgagtttaggagtttgaggttgtagtgagttatgattatgttattatattataatttgggtaagagagtgagattttgtttttaaatatatatatatatatatatatatatatatatatatatatatatatatatatatatatatatatatatgtatatatatgtatttagatgaaaagattattttgataatattatatgttggtgaggatttagaaaaattaggttatttattgttggtgggaatataatatagtacggttattttggaaaatagtttggtagtttgttataaaattgaatatatcgttagtatatagtttagtagtaattataattttgggtattaattttagagaaatgaaattttaatgtttatataaaaatttatatttaagtatgtatagtagttttatttataatatttaagaattggaattagtttagatgttttttaataggtgaatggttaaattatttagtaataaaaaggaatgagttattgatagtatgtaatagtttaggtgaagttatgttaatgaaaaaagttaattttaaaaggttatatatattgtatgattttatgtttttttgtaatggtatagttttagggatggagaatagattagtggttgtttggggttagagatggggtagtagagtaggttagtggtggtagaggagagaaaagagagggaggtgaatgtggttataaaaggataatataggggaatatttgtaatggaaatgttttgtttttttttttttttttttttttttggcgatagagttttgttttgttgtttaggttggagtgtagtggtatgatttttttttattgtaatttttgttttttgggtttaagtgatatttgtgttttagttttttatgtttagagtgaaataaattagaggtaatgtttatttaaataatttaatatatatgatattaaaatattaagattaggtcggacgtggtggtttatgtttgtaattttagtatttttgggaggttaaggtgggtagattatttgaggttaggagttcgagattagtcgggttaatatgatgaaattttattttgattaaaaatataaaaattagtcgggtatggtggtgtgtatttgtagttttagttatttgggaggttgaggtaagagaattgtttgaattcgaggggtagaggttgtagtgagttgagagtgcgttattgtattttagtttgtgtgatagagtaagattttatttttaaaaaaaaaaaattaagattaattaaaatatagtattattgggtcgggtgtggtggtttatatttgtaattttagtattttgggaggtcgagatgggtagattacgaggttaggagatttagattatttcggttaatacggtgaaatttcgtttttattaaaaaatataaaaaattagtcgggtatagtggtgggtgtttgtagttttagttatttgggaggttgaagtaggagaatggtgtgaattcgggaggtagagttggtagtgagttgagatcgcgttattgtattttagtttgggcgatagagtaagatttcgtttcgggggaaaaaaaaaaataaataaatagaatgttgtagtgtttttgagtttatatgtttttttttacgtttgtgtgttcgtgtagattgtttgattatataattagaggaggttggcggaggattgttttaatttttttttttttgagatagtttggttttgttttttaggttagagtgtaatggcgtaattttggtgtattgtaatttttgttttttgggtttaagtagtttttttgtcgtagtttttcgagtagttgggattataggcgttcgttattacgtttaattattttttgtatttttagtagagtagcgttttattatgttggttaggttggtttcgaatttttgattttagatgatttgttgttttagttttttaaagtgttgggattataggcgtgagttatatttggtcgtttgttttaattttgaaggtgaagtgaaagtgattatatttattaaaagtgattgaaaagttaggattgtttttattttgtttttttagtttttgtttagagtaaggtggttttttttttatttaattattatatttattttttatgtagaataagttagtttgagttattagtttattattttaattaaattttatgggggaaggaattagttttagttttttaaatttttaggtttgtttattggataaaatgagatagtaaggtagtgtttttaagttagattttttatttttttggtaatataatttttttagaaatttagtagttttttagtttagttgtttttagttggttttatgttttggattatttttttttattttattttgatagtgttaattgtgaagatatttgaagttataggtttggatgggaaggaggtatttttagtttgattattttcgttaggttgtttatttttttttgtttggttgagaagttttaataggaggtttatttttagttatttggggatatagaagtagttagttattgtttatattttattgaggtttgtgtggtatgttgattgtagttagttaacgattttgagaattgaaggtagtttggtatatatagagtaggtattagattgtgttttttttaattgaattttttattttttgtaatttatgttattattttttgtattgttgagaaagaaagaaagtttttaattaaattatattattggttgtaagatgtagtttggttttagtgatgttaatatatgatttaaacgtgaaattgattgagtattggtgaaatatagaggagatttaaagttagaagatttgggtttaaatgttggttgtatgattttatatttgtgtgattttgggtatgttatggttggtattttaattttttttttttataatgggggaagtgaggttagttatggtggtttatatttataattttagtgttttgggaggttaagatgggaagatcgtttgaggttaggagtttgagtaattgggtaatatcgtgaggtttcgtttttataaaatattttgaaaaaattagttaggtttagtggtgcgtgtttgtggttcgcgttatttaggaggttgagacgggaggatttttttagtttaggagtttaaggttaaagtgagttatgattgtgttatcgtattttagtttgggtagtagagtaagattttgattttaaaaaaaagtaaaataaagtaaaatgggggaaatgaattgttttagtaatattatttgttttttttgtgagtagcgtagtttgatagttattggtgaattcgtgttttgtgtttttttgtttagatttttattttgttcgtaatatggagtataacggtttatttatagtagtcgagaaatatttattgaatgaatgaatgaggtgtagaattaagtggagtgggtaatttaatatatattaattttttttttttttttatttttaga

SEQ ID NO: 2114 - DNA, 15698 bp, Artificial Sequence
  chemically treated genomic DNA (Homo sapiens)
tttaaaaataaaaaaaagaaggaaattaatatgtgttgaattatttattttatttagttttatattttatttatttatttagtgagtgtttttcgattattatgaataaatcgttatattttatgttgcgggtagaatggggatttggatagggaagtatagggtacgagtttattaatggttgttaagttacgttgtttatagaaaaaatagatgatgttattaaagtagtttattttttttattttattttattttatttttttttagagttaggattttgttttgttgtttaggttggagtacgatagtataattatggtttattttagttttaaatttttaggttgaaaggattttttcgttttagttttttgagtggcgcggattataggtacgtattattgggtttggttaatttttttaaaatattttgtagagacggggttttacgatgttgtttaattgtttaaatttttggttttaagcgatttttttattttggttttttaaagtattgggattataggtatgagttattatgattggttttattttttttattatagagagaagaaattgaagtgttaattatgatatgtttaagattatatagatatgaagttatatagttagtatttaaatttaggttttttggttttaaattttttttgtattttattaatatttaattaattttacgtttgaattatgtgttaatattattaaagttaaattgtattttataattagtggtatagtttgattagaaatttttttttttttttagtagtatagaagatgatggtatagattataagagatgggaaatttaattagaagaaatatagtttaatatttattttatatatattaggttgtttttagtttttaaaatcgttaattgattataattaatatattatatagattttagtaaaatataagtaatggttaattgtttttatgtttttaaatagttgggaataagttttttattaagattttttagttaagtaaaaggagataaatagtttggcgaagatgattaggttaaagatgttttttttttatttaaatttatggttttagatgtttttatagttggtattattaaaataaagtagagaggggtgatttaaaatataggattaattaaaaataattaaattaaaagattattaagtttttgagaaaattgtattattaaagaaataaaaaatttaatttaaaaatattgttttgttattttattttgtttaataagtaaatttggaagtttaagaaattaaaattaatttttttttttatggaatttagttaagatgatgaattgataatttaaattgatttgttttatatgaaaagtaagtatggtgattaagtgaaaaagaaattattttgttttgagtaagaattggaaaaatagggtaagaatagttttggttttttaattatttttggtaaatgtagttatttttattttatttttaaaattaaaataaacggttaggtgtggtttacgtttgtaattttagtattttgggaggttggggtagtagattatttgaggttaggagttcgagattagtttggttagtatggtgaaacgttgttttattaaaaatataaaaaatagttgggcgtggtggcgggcgtttataattttagttattcgggaggttgcggtagaagaattgtttgaatttaggaggtagaggttgtagtgtattaagattgcgttattgtattttagtttggggaatagagttagattgttttaaaaaaaaaaaaattaaaataatttttcgttagttttttttaattgtgtaattaagtaatttgtacgggtatataagcgtaaggaggggtatgtaaatttaaggatattatagtattttatttatttatttttttttttttttcgagacggagttttgttttgtcgtttaggttggagtgtagtggcgcgattttagtttattgttagttttgtttttcgggtttatattatttttttgttttagttttttaagtagttgggattataggtatttattattatattcggttaattttttgtattttttagtagagacggggttttatcgtgttagtcgggatggtttggattttttgatttcgtgatttgtttatttcggttttttaaagtgttgggattataggtgtgagttattatattcggtttagtaatgttgtattttaattgattttggttttttttttttggagatggagttttattttgttatataggttgaagtgtaatggcgtatttttagtttattgtaatttttgtttttcgggtttaagtagtttttttgttttagttttttaagtagttgggattataggtgtatattattatgttcggttaatttttgtatttttagttaagatggggttttattatgttggttcggttggtttcgaatttttgattttaagtgatttgtttattttggttttttaaaagtgttgggattataggtatgagttattacgttcgatttgattttgatgttttaatgttatgtgtgttggattatttggatgaatattatttttggtttgttttattttgaatatgggagattgagatataagtattatttgaatttaggaggtagaggttgtagtgagaaaagattatgttattgtattttagtttgggtaatagagtaagattttgtcgttaaaaaaaaaaaaaaaaaaaaaaagataaagtatttttattataagtatttttttgtgttgtttttttataattatatttatttttttttttttttttttttttgttattattaatttattttattattttatttttaattttaggtaattattaatttattttttatttttaaaattgtgttattgtaaaaaaatatagaattatatagtatgtataattttttgggattggttttttttattagtataattttatttaaattgttgtatgttattagtagtttatttttttttattattgagtagtttaattatttatttgttgaaggatatttgagttgattttagtttttagatattatgggtaaagttgttatgtatatttgagtataggtttttatgtgaatattaaggttttatttttttaggattaatgtttaggattgtagttgttgttgggttgtatattaacggtatgtttagttttatgataaattgttaaattgttttttagagtggtcgtattatattatatttttattagtaataagtgatttagtttttttaaatttttattagtatgtggtattgttaaagtgatttttttatttaaatgtatatatatatatatatatgtgtgtgtgtgtgtgtgtgtgtgtgtgtgtgtgtgtgtgtgtgtgtgtgtgtgtgtatatttagagatagggttttatttttttgtttaggttgtagtgtagtggtataattatagtttattgtagttttaaatttttggatttaagtaattttttagtttttttagttttttgagtagttgggattataggtatatattattatgtttagttaattttttaaagttttttgtagagattttataggtgttgttatgttggttatgttggtcgtttggttttaggtaatttttttattatatcgttttaaattattggtattataggtatgaattattgtgtttagttaaaatgattttttaaaaatataaattaaattatttgttttgattatataagtttattttggtgtataagacgttcgtttttaattttttatttttcgtagttttatttttatttttgttttttattttattttagttattggtttttttattggtttttaaatatggaaagtatttttgttttttgttaattttgtttggattttttttttttcgttatatatatggtttgttttttttttatttaaatgttattttttaattatagtttttttttgtgttttaaataaaattgtatattgtttttttttttattcggttgtttttttttatagtggttgtttagatgaaagggtttttttagtttatttaagcgagttttattattaatggttgggagtttttcgtaggtttattttagtttatttattatagttatagaaatgtttaacggttttatagtagataagtaaggttattttagttatatttggatatatatgagtaatataggttttttttttaaatgtttgtattgttattagtaataataaaggtaaggtttaagtatttatagtggagttttttaaattttaatgtgtatgtaagttatttattgaatttgttaaaatatagattttgatttgttaggttaagtagagagagtttgtttatgagattttaaatgatattaaacgattgtttttgagattttattgtgatagtaaggatttatggatatattatgtttttaatatatattttagtttttaaattgatttaatttaatataatattaaatagtgttttataaggtattttattttttttttttgttgtttgaataagattaaatgttttgagtgtggatttatttaaaggtagtttattaagtggttgatttatttataggaaatggaggtgatggggatggggattttttaaggtagagagaatatgttattagtatattttatagttataaaaatgtgagatttttgtttttatatttttaaaagtttttttttaaaaagaaattttaaaatattatatagtaattaataagaattataggtattgttatggaataatatttatgatatattgttaagtaaaaaaatatatatgtaatgtgattttagttaagtaaataaaaaatgatatatttaaatgtttgtatatgtatattaaaatttgggaagaagatataagaaatatttttgtttttaggaagttagataaagatgatagatttgtaagaagggttttgttttttatttgtgttgtttgaagatatttttataatgtatatgtgtaatttttataatttttaaaattagtttaaaaaaaaaataaaaatagttaaaaaagaaatgttttttagtagggtgtggtggtttatattttgtaattttagtattttgggaggttgaggcgggtggattatttgaggttaggagtttaagattagtttgattaatatggagaaatttcgtttttattaaaaatataaaattagttgggtgtggtggcgtatgtttgtaattttagttattagggaggtcgtgtaggagaatgttttgaatttgggaggtagaggttgtagtgagtcgagatcgcgttattgtattttagtttgggtaataagagtgaaatttcgttttaaaaaaaaaaaaaaaaaaaaaaaaagaaatgttttttaaatgtggttttattatattttaatttaggagtgggaaaattataatttgtatatttttggttagtttataagttaagaaatgtttttatatttttaaatggttgattaaaataattaaatattattttatgataggtgaaaattatatgaaatttaaatttttttgttattaataaaattttattggaatatagatatttatatatattgtttatggttatttttatgttataatggtagagtcgcgtagttgtgatagagatattgtgtttatatagttcgaaatatttataatttgattatttatataaagtttgtttatgtttataggtggaagataatattgttaagatgcgaatattttttaagttgatttatagatttaatataattttttttagaattttatttggtttttttgttgaaattgataagttgattttataattcgtacggaaatgtaagggatttagtatggttaaattaattttgaaaaggaataaagttggagaatttatattttatgaatttaaattgtgatataaattttagtaattaagattgtatggtattggtataggatcgatataaagattaataggtagaattgatagtttagaaataaatttatataattaaggacgattaatttttaataagggtattaagataattttatggggaaagaatagtttttttaataaatagtgttgggataattgaataattatatggaaaagaataaagttggatttttatttgaattatatataaaaattaatttaaaatggattagatttaaatgtaaaattttaaaatttttagaagaaaatataggagtaaatttttttgattttggattagataatgattttttagatatgatatttgaagtatagtaattaaagataaaatagataaattcgattttattaaaattaaaaatttttatattttaaaagatattattaagaaagtaaaaagataatttaaaggaagggagagtttttataaattatttatttgataagaatttagtatttagaatatataaagaattattataatttaataataaaaatataaagggaaaaaatgagaataagggtttgtaaggtaagtataagaaagagtttgggttttgatcgggtgtagtggtttaaatttgtaattttagtattttggtaggttgaggcgagtggattatttgaggttagaagttcgagattagtttggttaatatggtgaaattttatttttattaaaaatataaaaattagttgggtatggtggtatacgtttgtaattttagttatttgggaggttgaggtagaagaattatttgaatttaggaggtagaggttttagtgagttgagattatattattgtattttagttcgggtgataagagcgaaatttcgttttaaaaaaaaaaaaaagaaagagtttgggttttttaatttattgttgaatttttttagatttatttttgttttttgataagtttttgtttgttattagtttaagttattgtagtaggattttttgttatttgtagttgaatataaatttgataacgtaagttattgttaaattgttatatttagtagagtttaataagtgtagttggtttcgtatttaaaatttagttagttattttttatattgtttatagtcgatagtcggtattttgatagaatttattatgtttatttgagtattgtagtggttttttaattggtttttgtttttgtcggtgtttttttttattttgttgttagttagagtttatttaagattgaaatttagattatgttatttttttgttttaattttttagtgatattttattttatttatataaatgttaatatttttattttatttataaggtaagtagtattggtttgatatggtatttttttgattttttggattttattttttattataaatgttttttttatttaatttatttaattaaaatgatatttttgttatttttgaaataggaagattttggatttgttttttttatttggaatattattattttatatatttttatattagatttttaattcgtttgaggtttttatttaaaagttattatttggttaggtgtgatggtttatatttatagttttaatatattgtgaggttgaggtgggaggattatttgagtttaggagtttaaggttgaagtgagttacgatagtgatattgtattttagtttgggttaaagagtaagattttgttttttaattttaaaaaaaaaaaaaaaaaaagttgtttttttagtggattttttttgaatatcgtatttaaaatattaatattggttaggtatggtggtttatgtttgtaattttagtattttgggaggttaaggtaggtagattatatgaggtcgggagttcgagattagtttgtttattatggtaaaattttatttttattaaaaatataaaaattatttaggcgtggtcgggtatagtggtttatgtttgtaattttagtattttgggaggtcgaggtgggcggattataaggtcggcggatgacgaggttaggagattaagattattttggttaatacggtgaaatttcgtttttattaaaaatataaaaaaattagttggacgtggtggtaggcgtttgtagttttagttatttgggagattgaggtaggagaatggcgtgaattcgggaagcggagtttgtagtgagttgagatcgcgttattgtattttagtttgggcgatagagtaagatttcgtttcgggggaaaaaaaaaaaattatttaggtatggtagtgtatgtttataattttagttaaataggaggttgaggtatgagaattatttgaatttaagaggtagaggttgtagtgagttaagattatattagtgtattttagtttggttgatagagtaagaattgttttaaaaaaaataaaataaaataaaataaaataaaaatgttaatatttagtgttatagtttttttggaatttgtttagtaggttttttgggttttgttggaaagtttttaataatttttttaaaaataaaaataagttaatattcgattaattttgatatttttttatttttttttttgttttgaagtttttttacgtattaacgtattgtatattttatttatttattttgtttattgtttatgttttttattagaatgaaagttttacgagggtagagttttgtttgtttattgttgagttttgtatttataatagtgttaggtatatagtatatgtttagtaaatatttattgatgaatgaataaagttagggaaatattagataggaatttgaaggagaataagaaattgttagaagtaagtattaattgttttttaattattgtgaggatttttttaagtatgttagatttgttgagtttgtagttagttttataaggaatttttgtattttgtatgttgagtagagtataaatatttataaattgaggtttatgtatggcgtgatattatagttttatattaaagagtaagagttataaaaatagaatagatattttttaaattgtttttattaattttattttgagaagaggattttttggttgaagtacgtgaatagaattgttaaaatttaaattttgtgagtagtgtttgttatttaaaattagtgaatatttttttttttaatagtaaaatatagagaaatatgataaatatgtattttatttaaaataattataaaattataaataaatttaatgtagttgattttagagtatgttaagaatttttaaaagttattattttagttaggtatggtggtttatatttgtaattttagtattttgggaggtcgaggtggatagattataaggttaggagtttaagattagtttggttaatatggtgaaattttatttttattaaaaatataaaaattagttggatatggtggtgggcgtttgtaattttagttatttagaaggttgaggtaggagaagtatttgaatttgggaggtagagattgtagtgagtcgagattgtattattgtattttagtttgggtgataatgtgagattatattttaaaaaatatatagatatatattattttaaattatttttgtttttagagtattttaaatttattttataatatgaataggttatatttggtaggatatatgaggaattgaaatagtgtttgtttttggggataaagttaggtatttagaggaaaggggtggaaggaagatattttaattattgtttttttgtaattatagaatttgtattatgttaatgtattatttatgtaaaaataatatattaaaaaaaattttttttgagatagagtttcgttttgttatttaggttggagtgtagtggcgtgattttaatttattgtagattttgtttttcgggtttaagcgatttttttgttttagttttttaggtagtttggattataggtacgtgttattatgattagttaatttttgtatttttagtagagatagggttttattatgttagttaggttggttttaaatttttgattttaggtgattcgtttatttaggttttttaaagtgttcggattaaaggtgtaagttattttgttagttttgattaaattttttaaataaggtaattatatattattttaaagtaatgaaataaaatttattttttttgttaaggtagtaaaggaaattttttgatatttatattttgaagataagtaaatgtaggttttgttaaattagtataagaaagagaaggtatatttttagaatgattaagtgtttgaagtagtttagtagaaaggtttttttttttattaggagttttgtttagtgtttatataagatatatgtaatgtgtgaatttttatgatatttattttttagaaaagtattatagtaaatttttggatgagaaattatttattgaagagataagttaaattgttttaaaatttttttaaatatttaaaaagtttttttattttttagaataatttatttttaaattttattttaataaataagttaatattgtttttcgaattattttttaattaaattttgaagacgagataaggattataatagaaataaagaataagaaatattattaaaaattaattagttttaatagagatatttttattaaatgttatttgggatatatttagatcggaaatagaatattgagaggtaagagaaaggtttgaattgtattagagtattttttaatttttattgtatattcgatatatagatttttagggaaagttttggggtttcgttagatgttttaatggtttttttttttttgttttaaaaattttttttaagaataagtaatagaaatttttagtttttaaaaagtaataagttgttagtaatgaagtaaatagaaatttttttattggtatatttgagatgtttacggagtttgcggatttttcgtattttggtaagtttgattggaatattggtaaaatgtatattttatttatttttcggtaattaatttttttattagtaacgtgttggttttatttttaatatatataggtaaaaaattttaattaattttttttaatatttaagataattttattaattattacgtaagtttattattttatttggtaattataatttatttaaacgtttgtagattaatttaggtttagatgagtagattttttaggtggtgtttaaaatcgtgttattattatcgtgattatgaattaaatgaaatgttttgataatgtaggaagagttttaaattttaggttgttttaagtgttattaggaaaagaaattttttattggacgcgtttttatttttcgttttttttttgtttcgttattttcgtcgaggcgttttaaaagtattatgttatttattgtttttatatttttttagttttaaatttcgttttttttcgaagtgtttcgcgtttttagttttttttttttttagattagaagagggaagtggtattgagtaaatttcggtttttttaagttttttttataacgtagttaaaagaattttcgttttggtttttcgtaaataaaaagaaataagttttcgttttaatttttcgtattttgcgaagggcgagagggttgaggtcgtgatttttttcggtgaatttaggataggttttaataaggttttgttttttttcgcgagaggataagggaagatttaagtgagggagcggggttgaagtgggggaaggtttcgttttaggagggggcgggtgttttttatgggttttgggttgttgggttattttgtttttgcggggtcgggggttcgtgtcgtcggttcgtaggttgtagggttatcgttattttcgtcgtagtttgggattcgtcgggatagggagttgtagcgggtttaaatttacggtcggtgtagcggttttttagttatagtcgggtcgggtggcggcgggggcggcggcgggggcggttgcggttgaggtagtagcggttgtgtttgcggcggcggttgaggaagttgaggaggcggcggcggcggcggcggcggtggcggttgttgttgttgttgttgttgttgttgttgttgttgttgttgttgttgttgttgttgttgttggaaggatttgagggattcgaaggtttttattagtttttttagggtcgttatggcggtttttcgttcggtacggtagttttcggaggtttcgggtcgattcgcggcgtcgtttagtatcggggtaatgaatggggttttgggtcgtaggtaaaagtagaatttgagcggtcgtttattttggattcgtttcggtagtttttacggcgttttgcgttttagacgttgcgtcggcggaggcggggtcgcgtcggcggaggcggggttacgtcggttagtatgattgatagttttagtttgcggattttgttaatggttggttagggaattagttcgtttttgttttcgtaggttttgttttatatagtaaggtcgttgatagcgtagcgttttattcgggcgaaggcgcggggtttaacggagaggggacggggcgtggtgagattgtaatggggtgaggcgaagttgtgtgtgaagtgtcgcggcgaggcgggacgaggaagggacggggcgggattgtatggtaagggaggcgtggcgatgcggggggcgtggcgatgcggggggcgtggtgaggtaggggcgtggcgaggtcggggcggggtatagtagggaggtcgtttgaggggcggggcgagacgggggcggggcggggcgatgttggggacggggatattaggtaggtcggttgaggggcggggcggttgaggggcggacgggataggggaggggattggtcggtgagggttggggaggttgggggcggggtaggaaggtgagaggtggggcgagggaggggtggggcgcggaggggtagggttatggaggggttcgtttatgaaggacggggttatggacggggcggggtcgtggagggggcgtcgagcgcgggcgtaggtttatgcggaaaggatttttcgtcgacgtttggagcggggcgatagtcggtcgtggattttgagtcgaggtggttttggggtttgttttttcgttatattggttcgtggttagagttatatttattcggatagttttgcggggagttagttgcggggttttttgtacggggagagggtgggcgagtttttgcgtagagcgtagagaatgcgcgtggtcggtacgatttgaggattttaagtgtgatttttattttatttttagtgagttggagaggtttttgtagggcggtgtttataggtttggcgttttttatcggttttagcgtagcgtttcggaagggaggagagggtttggggtaggtttgggtggttagcgtttgttgtttatagaggtattgtgattagtgtagcgagaagtagttatggttataagatgtcgtttataggaatgagtttcgatttgggggcgtttttttatgggagtgtatttttgttttgatttttcggtaggatttttaaggggcgttatttagtagtagtttagtagaggtttgtggggtatttttttacgtttgggatataggtcgtggcgggtagggttttggtttttagagttttttgttttttgggtggtagaggggtaaacggagagggtagttgtttagtttgtttagtagggagtaaggttggttttagagataatcgtttagtcggggggtgatgtaggtagagaggagtttagtaaagtttattttagttaggttatatttgtaatttagagttttttgttttgtggttataaatagtattttcgttttgttttagagtttgttttaaagggaaatttagtattgtttttagtggggtagtagtagtttttttttttttgagaaggatagtagagaaatagttgttagtttttagtttttgggaggttgatgtgggaggattatttgaatttaggaatttgaggttgtaagtgagttaggattgtattattgtattttagtttgggtgatagagcgatattgtttttaaaaaaattaagttttagcgaggtgcggtggtttacgtttgtaattttagtattttgggaggttaaggtaggtagattattagaggttaggagttcgagattagtttggttaatatggcgaaattttgtttttattaaaaatataaaaattagtcgggtgtagtggtgtatgtttgtagttttagttatttcggaggttgaggtagaattgtttgaatttgggaggtggaggttgtagtgagttaagattatgttattgtattttagtttgggtgataagagtgagattttgttttaaaaataaataaataaataaagtttttagttttttgttgttaataagggtttttgtttattgtgttaggttttaaggttgttagttattttagtgggtagatttataagatggttttagtattttttattttttggtattgatatttttgtatgattttttttcgtgagtttgggttgtatttggtggtttgtttttaattaatgggtaaaggtgatggaatgttattttatgattaggtcgtaaaagggtatgattttagtttttttggttttttttgttgtttttttggtatggatgttttgatgaagttagttgttatgttggagaggtttatatggcgaggatataaaggcggtttttggttaataggtagtgagaattgaggtttttagtttagtaggttatgaggaattggattttgttaatattacgtgagattggaaagggattttttttcggttgagtttttaggtgggaggtagttggtatttgattgaattttggcgagaagtggagttggttaagttgggtttaaatttttgatttatagaacgtgtgacgatatatatggttttatacgtaattatatataattttatgattagatatgtgtgttgttaagttatagtgttggggtgatttgttttagtagtagatgattgtatttgtttatttgggttgttataataaagtattatagatcgggtagtttaaataatagaaatgtatttttttatggttttagaggttagaagttcgagatgaaggtgttggtaaggttggttttttttgagttttgtttttgatttgtagatagttgttttttttggtgtttttacgtggtcgtttttttgagtatgttcgtgttttaatttttttttgtaagatattagtcggattatggtttattttaatgattttattttagtttttttatttttttaaagaatttgtttttaaatataattttattttgaggttttggggtttaggatattaatttgaatgagggatatagttcgttttataataataagtaatagagttgtattttagtagtcgttttgattttttttagagatttttttatttaagtagtttgttttttagttagtgtatgatagtttttgttttttttttagttagttatggttatataattaagtaagtgttagttagggagatgtaagtagaagtaatgagtagtatttttagaaaggaattatataaaatgaagggaaagatatattttttttttgttttttggaatgggatgtgttggttgggatttgagtagttattttggattatttgtataaaagttatattttggggtgatgggagttggaaggagggggtttagatgattgtgtgtagttgttattttagtttggtttggaatttt

SEQ ID NO: 2115 - DNA, 8622 bp, Artificial Sequence
  chemically treated genomic DNA (Homo sapiens)
ttgttttagttttttgagtagttgggattataggtattatgttcggttaggataatattttttgtttttagtagagatggggttttattatgttggttagagtagtttagaatttttgattttaagtgatttgttcgttttattttttcgaagtgttgagattataggtgtgaggtatagtatttggttttatgttgagattttttttattattagtttaaatattttttattttttaaggtataaggagaggaattttatgtgttgatattgggaggaagggtatagatttatttaaaagatttaaaatttttatgatagtaaaagaaatgtatattaagttttttagggttgtcgtaataaagtattattaattgggtggtttagaataaaagaaatttatttttttatagttacgtaggttagttgagattaaggtattattagggttaagatttttttgtagtttttggggaaggatttttttttgtttgtttttatttttagtagttttttgtgtttggtttgtggtagtataattttaatttttgtttttatttttatttggttattatttttttgtgtttgtgaggattttagttattggttggaggatttattttattttattataatttttttttaattagtgaatttatcgtattttagataaggttaggtttatagttattgagggttaggatagagtattttttggggagatgtaatttattttataagtgggtggaaaaggatgattaataagtggtatgtggggatgtattgttttgtatttacgtagtttttattttatttttttttataatatatatttgttattttattttttattaggtttatagagaaaagtagatttttaattatttttttgggatgtggatatagttttttttttggagatagggttttattttgttatttagattggtgtgtagtagtattattatggttgattatagttttaatgttttaggtttaagtgatttttttaattttttgagtggttgggattataagtgtgtgttattatatttgattaattttattttttaattgttttgtgaagatagtatttttttatgttttttaggttggttttgaatttttgggtttaagttatttttttgtttcggttttttaaagtgttgggattataggtaagagtttttatgtttggtttttaatttttgattttatgaatatagttttatattagttttttttatgtatgtgtttataagttaaatttttttttaagtgtatatgaaaatttgaattttaataaatatggtttaattttaaatttgatttttttaggagtaatttttgttatttttagtttattagtttttgtgagtgttgaattttagtatttttgtttgtttgtagtagaaggtggagttaggatagggtggtttaagattagagttttttttttaatagtttagttaattttttaattttggatttatagttttttatttgtttttttaaaggtgaaatgatttatttatttttagattatttgttttcggggttttattgagtaatttatggtttaagttttttaagttttttaatggttaaatataatggataatttttaggtatatttgatattatttttttgtagtttttggtatttataattattttatggtttttataatgtgattggttattttttttttgtttatatgataagtttttattttttttttgtttgttaaatgcgtttgatttttagtgttttgatttttattattttttttaaaaaaaaaagtttaaatgaaaaaagttttttatgaaaatattaaaatatatataaaaatagaatagatattgataatagattttaaaatttttagggaaatttagtagattgagaatagttaatatagttttttaaaaaaagattaaatttgaagttgagaaattttttgaatttaatttattaaaaagttatagtaattaagatagtgtagttttgatataaagataggattatagtttgggtgtggtggtttatgtttgtaattttagtattttgggaggttgaggtgggtagattatttgaggttaggagttttagattagtttgattaatatggtgaaatttcgtttttattaaaaatataaaaattaattaggtatggtggtaggtatttgtaattttagttgtttgggaggttgaggtaggagaattgtttgaatttgggaggaggagttagtggtcgggattgggttattgtattttaatttgggtaatagagtgaggttttgttaaaaaaaaaaaaagataggattatagattatagtataatgggataaaattgagattttagaaataaatttttatatttatggtagattgatttttgataagggtgttaaaatattttaatgaaaaaagagtttttttaataagtgatggtggaataattgaataattatatttttgttttatttggggttttgatttaaaaatttaggtaaagatggagagaaattagaatttttatatattgttgataggaggataaaatgtttattttggaaaagaatgtggtaattttttaaaaggttaaatagtgttattatatgatttagtaaatttatttttagatatataattaaaagaaattaaaatataagtttataaaaaaatttgtatataaatgtttataatagtattatttttaatagttataaagtagaaataaattaatgtttatcggttgatgaatgaataaataaaatatgttgtggtatgtttttataatagatattattggtttatgaaaaatatatataaaaatattatgttaaatgaaagaagttagttacggtaaagtaatatattatatgtttttatgtatattaaatgttttaaatagaaagaaagtagattaaagattgtttagggttgggaggggaggaggaggagaatggaggaatttgggaggcgatgaattaagggtattgaattaggggaatatggtttttttttggggagatagaaatgtaaaattttggtaatggttgtatatttttgtaaatatattaaaatttattaatttttgtattttattttatttattttatttttgagacggagtttcgtttttgttgtttaggttggagtgtaatggtatgatttcggtttattataattttcgttttttaggtttaagcgatttttttgttttagtttttcgagtagttggaattataggtgtatgttattatatttagttaattttttttttttgagatgaagttttgtttttgttttttatgttggagtgtgatggtacgattttagtttattgtaatttacgtttttcgggtttaagcgatttttttgttttagtttttaatgtagttgggattatagttgtttgttattacgttcggttaatttttgtatttttagtaaagacggggttttattatgttggttaggttggtttcgaatttttgattttaggtgatttgtttttttcggtcgtttaaagtgttgggattataagcgtgagttattgagtcgggttaatttttgtattttatatagatgaattatatggtatgttaattatattttattaaaaattgaaaaaaaggaatagtattattagttttaatgtgtttattattaatattttatatgtttttaatgttattgtatttgtttgtttatagtcgaggttttgatattttgtttgatttttttgaattgttaaaatttgtatatatgtttataaaaataatgtttgttgaatttgttagatatgtaaaggtttggagtaaattaggtgtattaaatttattaatattgtttgaaatgtttaaggtaataatttttaaatttcgttgagggagaaggaaagtttttaaaattttattgtttaggtggtattttatattgttattgggaattatgtattgggatggattttttaatcgaggagattattatagtcggagttttgaattagtaattttagtttttgtgatagtgagtaaagaattataaattaatattaaaatgtaagtttaaagtaaagtttattgaagtataataatatattttgagggatagcgggtttatttttgcgaagtgaatttagtatttttttatagagtttaaggtgtttttatggggtttgtggggaggagttgaggtttgggttgtatttgagtgataggatgatgttatttgattgaagtgtatagttatataatttaaaattaaattgtgtatggttttatttataatttgttaagaaaagttttttagggatgggggggtaaaattgtatgtaaattttattataatgatggtatgatgaatttggggtgaatttgaagataggtttttgtgttgttgggtatgtgttattttagggaatttttatttgtatttttttttttttttttttaggatattttggttatagattttattataaattttattttttagggtggtattagggtagttttgggtttgaatttaggtgggttagtggttgttttagtgatagttttttcgtttttttttgttatttttttttaattgttaatgtttaattatttaataattatttattaaattagtgtgtttggggttaggagtaggttttaatatgtttaattattttttagataattttaatattgtaaagtttgtgaaatatttgttagataatttaattatgaaggttgtggaaggtgttttagtaggatttaattggttaatgttatgatttaattaatttgaattaaaaaataaaatgaaaaagttttatatttttaagttaaataagatataagttggtttaaggttgagataaaatttttaaatgtatgattgaattttgaaaattataaatatttaaatatttaaagtttagattagaatattgcgaagttattttttttaattaataatatttttttaggatttaaaaattaagggggatattggattatttagtgttttataagtaggtattttttgttgtaggagagagagaattaaagttttgaaagatttgttgttttttattaggaagttttattgggtattttttgagtttaggtaatagttgtagggtgatttttggagttattttcgttttttcgttttttaaaagaagcggagatttaacggggacgtgcggttagagttggggaaatgggttcgcgagttaggtcggcgtttttttttttgatgtttttgtagatcgcggttttgtaggggcgtttgttgcgtgagttcgagggttgcgggcgaattaggggcgcggcgggggtggaaaaatcgaaattagttttttttttgcgtttgggagtttgttaattttggaggatttgtttaattttattcgtaagtttttttttttattttttgcgtttagatttcgtgagggagtgtttattattgaattgtagataggggtttttcgttttaggatttgttttttttttcggttgtttcggttttgcggagtgatttttggaatcgtttattttttttttttaattagaatgtttttaaataaatttcgtagttttttatttgagttgagttaagtttggggttttttgaatttggaattcgggtttatttttaatgttagttgtgtagttttttttttagttatttttaaataggaagtttttttttgagtgtttgtcgagaaggttgagtaaatttatagtaggattcgtacggggtttttattttagaacgaatgcgttgggcggtgggggcgcgaaagagtggcgttggggatttgaattttttattattttatttatttttggtgagatttggggtggaggtttttagggtgggaggtttttgagagaggtttatttcgggtttttttttatttttggtaattgtttttttgtttggaaaattaagtatatgttagttttgaacgtttgaattgaataatttttttttcggttaggttttattgatttgtaatgtgttgtgtaattaagaggtttttttataaagtattgataatgaatatgtaagtaatgtatttatttttaagttatatttatatttgattttatttgatttttattaggtatagggaggtaggagttaataatacgtttattttattagaagttaattggaatttagattatataattttttttaggttataaagaatataaataatttggttttttgatgttattttaagtattatagttgtttttaattttagttgatagtgattttgttttgtagtgtagtatagtgttttgtgggttatacgtcggttttagtatagtattttgagttttggtattacgtgtatttatattttatatatgataagaatgaggtatggtacggtttgttttttggtaaatttatttaatggtatattgggttttggtggtagagtttatgtttttattttatagttatgatttttaaatattatattgtattagaggttgaataataaaattttatgttgagtagaaatatttattgtttataagtgtaaatgagttttagttatgtgttgtattgtttaagttttaagggagagagtagggaaataagtttttattttttgatattttgtattttagtgggagagatgataataagtaaatgagtagaaagatatataatattaggaaattatgggtgttgtgagaagtagagaagttagggtaagttattttggggttgatatttgagtagagatatgaaggaaataagaatgatattgattgggagtagtattttttaggtaaattgagtgggtttggtaagttggattaaaaagcgggtttttttagtattatttatgtgtgtgtgtgtggggggggggggcggcgtgggggtgggaagggggattattatttgtatgtaggatgtttagtagtattttgttttttttatttattaggtgttaggagtatttttttagttttgataattaaaaatgtttttaaattttgttatatgttatttagtagataaatttttggttaagaagttcgggttgaaaaaaataaataagtagtgttggggagtagaggttaagaagtaggtaatgggtttagaagaggagttataaataaggttgtgtaggcgtttgtaggttgtggtgtgaattttagttaaggagtaatagtgatttgttataggtttttaaaagattgttttggttgttatgtggaaagtagaatgaagggagtaatagtaaaagtagggagtttagttaggaagttgttatatagtttaggtaagaggtagtggagtgggttgggtgggaatagaaaagggagtgataaattattgttttttgaatatattttgaaggaagttgttgaaggattttatgttgtgtgagagaaagagaagaattggttgggtgtagtagtttatgttaaggaggaggttaaggagagtagatttttgagtttaggagtttaagattagtttgggtaatatagtaaaattttttttttataaaaaatataaaaattagttgggtgtggtggtatgtatttgtgattttagttattcgggaggttgaggtggagggtattgtttgagtttaggaagttgaggttgtagtgagttatgattgtgttattgtattttagtttaggtgatagagtaagattttgttttttttgattttttgaaaaagagaagagttaaagttgattttgttttttattttaattttattggtttgagtagtggggtaattggtaatgttatttttgagatggtgaaggtagaggaaagagtagtttggggtaaattaaggatttgtatttggatatgttaagtttgagattttagttaggtttttaagtggtgaggttatataggtagtttagtgtaagaatttaggattaaggttgggtacggtggtttatttttgtaattttagtattttggtggttgaggtaggtagattatttgaggttaggagtttgagataagtttggttaatatggtgaaattttatgtttattaaaaatataaaaattagtttggtgtggtggcgtacgtttatagttttaggtttttaggaggtttaggtaggagaattttttgaatttaggaggtgtaggttgtagtgagttgagattgtgttattgtattttagtttgggtgatagagtgagattttgttttaaaaaaaaaaaaaaaaaaaaaaaaaaaaattgaaggaattattttttaggatttgggtttaatttgttttgagtattaatttttgagtttaattattatggttagatatattttaatattttttagaatttattagttttagtggagtttgtttaattatgagtattggaataggatttgggggtagtgagggggtggtagttacgtgtggtagagaaaagtatataaggaaagagtatttaggattgttatatggaagaaagataggattgtaatttattttttataaaatgaggattagatatagttgatggtatgagttgatgtaggtgtgtggagttttaatattttgttttttttttattatatatggttaaggtttgttgttttgtttttagg

SEQ ID NO: 2116 - DNA, 8622 bp, Artificial Sequence
  chemically treated genomic DNA (Homo sapiens)
tttggagatagagtaataggttttaattatgtgtagtaggaggggagtaggatgttgaggttttatatatttgtattaatttatattattagttgtgtttggtttttattttgtgaagggtgagttgtagttttgttttttttttatatgatagttttgggtgttttttttttgtgtgtttttttttgttatacgtggttgttatttttttattgtttttagattttattttaatatttatgattagatagattttattaaagttggtggattttagaaaatgttaaggtgtgtttagttatggtagttgaatttaggagttggtgtttagggtaaattagatttaaattttgaggaataatttttttagtttttttttttttttttttttttttttttgagatagagttttattttattatttaggttggagtgtagtggtataattttagtttattgtaatttgtattttttgggtttaagggatttttttatttaagttttttgaaaatttgggattataggcgtgcgttattatattaggttaatttttgtatttttagtagatatggggttttattatgttggttaagtttgttttaaatttttgattttaaatgatttatttgttttagttattaaagtgttgggattatagaagtgagttatcgtgtttagttttggttttgaatttttatattgaattgtttatgtggttttattatttggaagtttgattggaattttaaatttaatatgtttaaatgtagatttttgatttattttaaattgtttttttttttgtttttattattttagaaatggtattgttaattattttattgtttaggttaataaaattaaaataaagaataaagttaattttaattttttttttttttagggggttaggggagatagggttttgttttgttatttaggttgaagtatagtggtatagttatggtttattgtagttttaattttttgggtttaagtaatattttttattttagtttttcgagtagttaggattataggtgtatgttattatatttagttaatttttgtattttttgtagagaaggggttttgttgtgttgtttaggttggttttgaatttttgagtttaggaatttgttttttttggttttttttttggtatgagttattatatttagttaattttttttttttttttatataatatagaattttttagtaattttttttagaatatatttaggagataatggtttgttatttttttttttgtttttatttagtttattttattattttttgtttggattgtgtaatagttttttggttgggttttttgtttttattgttgttttttttattttgttttttatatagtagttagagtaattttttaaaagtttgtgatagattattgttattttttggttagaatttatattatagtttataggcgtttgtataattttgtttgtggttttttttttgagtttattatttattttttggtttttattttttagtattatttgtttattttttttaattcgagttttttaattaggagtttgtttattaggtgatatgtggtaaagtttagagatatttttggttgttaagattgggggagtgtttttagtatttagtgagtagggaggataggatattgttagatattttatatgtagatggtagtttttttttttatttttacgtcgttttttttttttatatatatatatatgagtagtgttgagaaaattcgttttttaatttaatttgttaggtttatttagtttgtttgggaaatattgtttttagttaatattatttttattttttttatgtttttgtttaagtgttagttttagagtgatttgttttgatttttttgttttttataatatttatgattttttgatgttgtatatttttttgtttatttgtttattgttattttttttattagaatgtaaaatattaaagggtaaagatttgtttttttgtttttttttttggggtttgaatagtgtaatatatggttgggatttatttatatttgtaaataatgaatatttttgtttaatatgaaattttattatttaatttttaatgtagtgtgatgtttaagaattatagttatgaagtggagatatgagttttgttattaaagtttagtgtattattgaataaatttgttaggaagtaggtcgtgttatgttttatttttgttatgtgtaaaatgtggatatacgtagtattaaaatttaaagtgttgtgttgaggtcggcgtgtgatttatagaatattgtgttatattatagggtaaaattattgttaattaagattagaagtagttgtagtatttgaaataatattagaaaattagattatttatgttttttgtaatttgaaaagagttatataatttgaattttagttaatttttagtaaaataaacgtattattagtttttatttttttatgtttagtgaaaattaaataagattagatatgaatgtaatttagaagtgagtgtattgtttatatgtttattattagtattttgtagagaggttttttaattatatagtatattgtaaattaataaagtttagtcgaaaagagaattgtttagtttaaacgtttaaaattaatatatatttaattttttaggtaaaagaataattgttaagagtggggaaaggttcgaggtaggttttttttaggagttttttattttagagatttttattttaggttttattaaaagtgggtggaatggtgaagaatttagatttttaacgttattttttcgcgtttttatcgtttaacgtattcgttttgaggtggaaatttcgtgcggattttgttgtgggtttgtttagttttttcggtaagtatttagggaagaattttttgtttggagatgattggggaaaaaattgtatagttgatattggaaataaattcgagttttaggtttaaggagttttaggtttagtttagtttaagtgaggaattacgagatttatttaaaagtattttagttgggggaagggagtgggcggttttaaaagttatttcgtagagtcgggatagtcgggggagggggtaggttttggggcgagggatttttatttgtagtttagtggtaggtatttttttacggggtttggacgtagaaagtagggagaggggtttgcggatagggttgagtaggttttttaaagttagtaaatttttaagcgtaaagaaaaagttagtttcgatttttttattttcgtcgcgtttttagttcgttcgtagttttcggatttacgtagtaagcgtttttgtaggatcgcggtttgtaaaagtattaggaggagaagcgtcggtttggttcgcgggtttatttttttagttttggtcgtacgttttcgttaaattttcgttttttttggggggcggggaaacggggatggttttagaagttattttatagttattgtttaggtttaggagatgtttagtaaaattttttggtgaaaagtaataggttttttagaattttagtttttttttttttatagtagaaggtatttgtttgtgaaatattaggtgatttagtgttttttttggtttttaaattttgaaggggtgttgttgattggggaaagtagtttcgtaatgttttgatttgaattttagatatttaaatatttatgatttttaaaatttaattatatatttaaaaattttattttaattttagattaatttatgttttatttgatttagaaatataaagtttttttattttgttttttgatttaaattaattaagttataatattaattaattagattttattgaaatattttttatagtttttataattgaattatttgataagtgttttataaattttatagtattgggattatttggagaatgattaaatatattgaggtttgtttttaattttagatatattgatttaatgggtaattgttaggtagttagatattagtagttgggaggggatgatagaagagagcggaaaggttgttattaagatagttattggtttatttaaatttaggtttaagattattttaatgttattttaagggatggagtttatgataaagtttgtggttaaaatattttggagaaagagaaaggagggtataggtggaaattttttaaggtggtatatgtttaataatataaaagtttgtttttaagtttattttaagtttattatgttattattataatagaatttatatatagttttgtttttttatttttgggaggttttttttaataaattataggtaagattatgtatagtttaattttagattgtatagttatatattttaattaaataatattattttgttatttagatatagtttaaattttaatttttttttataaattttataaaagtattttgagttttgtaaagaagtgttgagtttatttcgtagaaataagttcgttgttttttagagtgtattattgtgttttaataaattttgttttaagtttgtattttggtgttagtttgtagttttttgtttattattataagaattgagattgttggtttagagtttcggttataataattttttcggttaaaggatttattttaatgtataatttttagtaatagtatgggatgttatttgggtaatgggattttaaaagtttttttttttttttaacgaagtttgggaattattgttttagatattttaaataatattaataaatttaatatatttgatttgttttaaatttttatatatttagtaaatttaataggtattatttttgtaagtatgtatgtaaattttggtaatttaagaaaattaaataggatattagggtttcgattgtaggtaaatagatataataatattggaaatatgtagaatattgatgatgggtatattggggttgatagtattattttttttttttaatttttggtaagatataattagtatattatataatttatttatgtaaaatgtaaaaattggttcggtttagtggtttacgtttgtaattttagtattttgggcggtcgaggaaggtagattatttgagattaggggttcgagattagtttggttaatatggtgaaatttcgtttttattaaaaatataaaaattagtcgggcgtgatagtaggtaattgtaattttagttatattagaggttgaggtaggagaatcgtttgaattcgggaggcgtaggttgtagtgagttaagatcgtgttattatattttagtatgggagataagagtaagattttattttaaaaaaaaaaaattagttgggtgtggtggtatgtatttgtaattttagttattcgggaagttgagataggagaatcgtttgaatttgggaggcggaggttgtggtgagtcgagattatgttattgtattttagtttgggtaataagagcgaaatttcgttttaaaaataaaataaataaaataaaatgtaaaaattaatggattttagtatatttatagagatgtgtaattattattaaaattttatatttttatttttttaaaaagaaattatgtttttttaatttagtatttttaatttatcgttttttagatttttttatttttttttttttttttttttagttttagataatttttaatttattttttttttatttggaatatttagtatatatagaggtatataatatattgttttgtcgtgattggttttttttatttagtataatgtttttatgtatgttttttatggattaataatatttattataaggatatattataatatattttatttatttatttattagtcgatggatattggtttgtttttattttatggttattgggaatagtgttgttataaatatttatgtataagtttttttgtagatttatgttttgattttttttggttatatatttagaagtgggtttgttgggttatatggtaatattgtttaattttttgaggaattgttatatttttttttaaagtaagtattttatttttttattagtagtgtatgagagttttgatttttttttatttttgtttgggtttttgaattagggttttagatagaataaaaatgtggttatttagttgttttattattatttgttgagaagattttttttttattgaagtgttttggtatttttattaaaaattaatttattataaatgtgagagtttatttttggagttttaattttattttattatgttataatttataattttatttttttttttttttgatagagttttattttattgtttaggttggagtgtagtggtttaatttcggttattggtttttttttttaggtttaagtaatttttttgttttagttttttaagtagttgggattataggtatttgttattatgtttggttaatttttgtatttttagtagagacggggttttattatgttggttaggttggtttggaatttttgattttaggtgatttgtttattttagttttttaaagtgttgggattataggtatgagttattatatttagattataattttatttttatgttaggattatattgttttgattattatagttttttagtaaattgaatttaagaagttttttaattttaaatttgatttttttttggaagattatattagttatttttagtttgttgaatttttttaggaattttaggatttattattaatgtttattttatttttgtatatgttttaatatttttataagaaattttttttatttaaatttttttttttaagaaaaatagtgaaaattagaatattgggggttaggcgtatttaataggtagaagaagaataaaaatttgttatataaataaaaaagaaatgattaattatattgtggaagttatggagtggttataggtgttaaaggttgtagagaaatggtgttagatatatttgaaaattgtttattgtatttggttattaagagatttagaagatttaagttatagattgtttagtgagatttcgagggtaaatggtttgaaggtgaatagattattttatttttaagagagtaggtaggaagttataaatttaagattaaaaagttgattgaattgttaaggaagaaattttaattttgagttattttattttggttttattttttgttgtaagtaaatagaaatgttgaaatttaatatttataaaggttggtaagttggaaatgataaaaattatttttgggaaagttagatttagaattaggttatatttgttggggtttagatttttatgtatatttgggaaagggtttagtttataggtatatgtatgaagggaattggtatagggttgtgtttataaggttaagagttgaaggttaggtatggaggtttttgtttgtaattttagtattttgggaggtcgaggtaggaggatggtttgagtttaggaatttaagattagtttgggaaatatagggagatgttgtttttataaaataattaaaaaataaaattagttaggtgtggtggtatatatttgtggttttagttatttaggaggttgggaagattatttaagtttgggatattgaggttgtagttagttatgatagtgttattgtatattagtttaggtgatagaatgagattttgtttttaaaaaaagagttgtatttatattttaggaaagtggttgaagatttatttttttttgtaaatttaataaagaatagagtgataaatgtgtgttgtggaaagaaatggggtgagagttacgtagatgtaaaataatatatttttatatattatttgttaattatttttttttatttatttatgggatgaattgtatttttttaaaagatattttgttttaatttttagtagttgtgaatttgattttatttggaatacggtgagtttattggttaagaagagattatagtggaatagggtgagttttttaattaatgattggggtttttatagatatagagggatgatggttaggtagagatggaggtagagattggagttatgttgttataaattaaatataggaagttgttagaagtggaaataggtaagaaagaatttttttttagaggttatagagggattttggttttgataatattttgattttaattggtttacgtaattgtgagagaataaattttttttgttttaagttatttagttgatagtattttgttacggtagttttaaggaatttgatatatattttttttattgttatagaagttttgaattttttaagtaggtttgtatttttttttttagtgttaatatatggaatttttttttttgtgttttgaaaagtgaaaggtgtttgaattggtaatgaaagaaattttagtatgaggttagatgttgtattttatatttgtaattttagtatttcgggaggatgaggcgggtagattatttgaggttaggagttttagattattttggttaatatggtgaaattttatttttattaaaaataaaaaatgttattttagtcgggtatggtgtttgtagttttagttatttaggaggttgaggtag

SEQ ID NO: 2117 - DNA, 7076 bp, Artificial Sequence
  chemically treated genomic DNA (Homo sapiens)
ttatggtttttattgttattataaatagtaggtaatttttagttattttttaattgattattggtaatataggatttaaagtaataaattttgagtttaagtaatggttttattatttagtatttgggtaaatttgggtaattatttaatttttttttgtttttattttttcgtgggtaagatgaagatagtattttttaatagttgtggtggtaaaaaataaaattaaaaaaggaaaaatagttgtggtaaattagatagattatttttagtagtttaaataatttgattgtaggttggaaggatggtgaattgattatagaaattataatttaaaggttagggtttagagtagtgaattttgatagggtaggagggtgtgtgtgtgggcggaggtgaggtaaggggtagatggtaggggtggggtggggattggatagattgggtaagtaatataattttggtaggatgtaggtgtgtgtagttttgaaaagatattgaagttacgaatgtggttttatgttatgaggcgtgattaattggttgagtaattttgtgtttataaaatggagattttagttaaaatcgtttgttttaagaatttgcgaattgatatggagtaattttaggaagtgtttagaagagatttattattatggttatatttttagaaaaaaataagaaattatatttgtgattttttttaacgtgtagtgttagtgacgttattgtagtttgtttttgttttagttaatttaggttttcgtaggatattttttttttgatggtattttatagtattgttaagtttgtggagttatatattagatttataatgttaattgttttttttttttttaatataaatttagtttagtatttaaggtttattttaggttttttcgattgagagtattttttgtttattatgtttatggtgatttttttttttttttttaagattattggttttattgtttatttattttaatataaattatttaaagtgtttgtttttattttttaattgacgtataagtaaagcgatatgggggtagaatttatatttttttattttgtatttttttagtaatgttttgtatataaattttgggattagtttattgtaggtatgtggtggttaggttaagggtagaggtaatgggaaaggagaggatttattttttgggtggttgtgtagaggtaataaaagaaaggtaatatgtgggaatttggttggggttttatattttttcggtttcggtgttatattaataattaataaataagtaataatggatagagtaattgaaatgttattttgaattggttagaggtggaaagatagagttatatttgtaaaaatggaagggttgggaggaggagaggaaggaaaatattgttgagtataggtgtttgggttttttgtttttttttattttaaaaagtttttttagtgtttgaattaatagagaagtgaaatttttttttattattttttgttgtggttttatagaaggttttatattttttttgattgtcggagtagagatttagatataagagggaattatatttagttttattgttattggttagggttatgtttagtgttggtataggattatatagttagtgtttttttgttagggttaggttttgtagatattgaaaaggattttaggatttggtttttataaggttaggttaatagtttatttgggtaggatggggaggaatgtgagggggaaatgtattgggggggtgtgggggaaaatttagttttgaaatttgttaaaagagaaagtggaagggacggtggtttttagagtagaaggaattttgaggataggaaagataagatttgggtgaattgggttatggattgtgattttttttttttttttttttttagcggaggttttattaattttttttatttgagttattttagttttaagatgtagtgagtgtgtgggtatgtttaagagagtgtgtatgtgtgtgtgtgtgtatatacgtgtatgtgtaatagttgtataagaagaggagttatagtttttagattttgggtgtgaatttttggatttgttttttaatttgggaaatgaggataattaataagttttttttttttttttttttttttgagatagttttattttgttatttaggttggagtgtagtggtacgatttcggtttattgtaatttttattttttaggtttaatcgatttttttgttttagtttttagagtagttgggattataggtacgcgttattatatttagttaatttttgtattttttgtagagacggggttttattatgtttgttaggttggttttaaatttttgattttaggtgatatgttttttttagttttttaaagtgttgggattataagcgtgagttattatgttcggttaataagttttttaagatgagatgagatattatagaaaggatttatttagtattgtatttgtagaagttttatagattatgtattttttattttatattttgtttattttaatatatttgatagttcgttagtagagttagagtatataagtaaggtgagtgggggtagtggttgggagttatggtagagttttagttaattttaattagttatataacgaatttttcgtttttggtaataatttttgtatgtattttttatttttattttttttataggtgttagatttttttgagattagggattttgagggagggtaggtaagtgtggtgttaaggggttttttttataattttgttttgtttagtttattatttaataaaatttaagagtttttagaaattaagatgtgaagaggtagttttgaaatttattggggagtagaaggaagttaatttagagttttaagttagtgatggaaaatttattaattgtatagtttataatgggatagaagaatgaattgtcgtttaaaatttgtttttttaggttaggtacgatggtttatgtttgtaattttagtattttaggaggttgaggtgggtggattatttgaggttaggagtttaagaatagtttggttaatatgatgaaattttgtttttattaaaaaaaaaaaaaagataaaaattaattaggagtggtggtatatgattgtaattttagttatttaagtggttgaggtatgagagttatttgaatttaggaggcgaagattgtagtgagtcgagattattttattgtattttagtttaggcgatagagtgagatttttaaaaaaaaaatttgtgaaaaaaataaatacgtaaatatataaaatttgtttttttaagatatatacgtgattaagaagtatatgaaataatgtttaatattattaatgattagaaaaatgtaaattaaaattataatgagatatcgttttatattagttagaatggttattattaaaaagttaaaaaataataaatgttggagaggttgtagagaaaacggaaggtttatatattgttggtgggaatataaattagtttagttattgaggaaagtagtttggtaattttttaagaattttaaaatagagttattattcgttttaggaattttattattaggtatatatttaaaggagtatatattgttttattataaggatatatgtatatgaatgtttattgtagtagtatttataatagtaaagatatggaattagtttaaatgtttattaatagtagattgtataaagaaaatgtggtatatatatattatggaatattttatagttagaaaggtcgtgtttacgttttttgtagtattatggagttgggggttgttattttaggtaaatttatataggagtaggaaatgaatattgtatgttttattttatagtggagttaatatgagatatatggatataaaaaggaataatagatattgggttttatttgagggtggaggatgggaggagaagaggattaaaatattatttattagatattatatttattatttgggtgatgaaataaatttttacgttaaatttcgatgatatataatttatttatataataaatttgtatgtgtatttttgaatttaaaataaaggttaaaataatttaaaataaataaaaaataaaattttatttggtatttttaaaaaataaaaaataaaatttgtttttttaggggaagaaaagtaggaaagttttattttatttttttagtggttttataatgtagggatttgtttttagggaatagggtatagtaggggaaatatataggggtgtttagagtttggcgaaaggtaggtgagttttgggtattgattcgttattagttattttttaaggagtttgagaggtgttaatttgcggtttatttcgtgagattgtttagagtgtaggaggatatggtttattagtttcggaaagtagttattataattgaggaggaaatgaagtttgattggttagaatagaagtaataatggaggtttatggagggattttttaggtttttatttttgatttttatggtggcgttgttttttttattttgtagttttgttttgagattagataattttgtattttgtttgtgttttttttttttttagtagttttgtttttgttatttgttttagaagggttttgggtttttttattttaggatagataagggtttttgtaattatttttttgggtaatttttttgtaaggaataggagaggttatttggttttggttttttgggagagtattgagaagaaaaagttaaattagtgggtagtttaggttgtatatattttgggaatattgcgattattttttttagtaatttacggaaatttattggttgttttgtagaaaaagaattaagagagataaggagatttgttgtttaagattaaggtaggatgacgtttatttagtaattgatgatgttaggttgaggtatttagtgatttgtttttatatttgtttttgtttatttagttaatttgtttttgtttgggatattggattttcgtgagttggaaggaatagatttaatatttaggggttgggtatttttatattatttatttggggggttaagggattcgggtaatatagtattttgtttagtgtttggagattatttatttaggttggggtttttgggataggcgaggatttacggattttggaagagttggtttaggggattgaattttcggtatttttatagagtagagtatgattatatttttgtcgttgttgttggggtttagtttgggttgtataggagtaggtaaggatattttttttggggattttttttttttttgtttttgttttagggtaagggtgtttcgttttgtaattgtatttgatattttagatagtttgtttttttggtatatatttttatagtattttgtattttgtagtaattttaatgtaattaatttgtataattatttgtgtagtgtatattttttgttggaatataggtaaggataatgtttattttatttattgttgtttttttagtttttagtatagtgttttgtatgtagtaagtgttttataaatatgtgcgaagtgaatatttaatatttttagtataatataaggttgatttttttttttgatttttttttttttttaataatttgttttattgaaggtttgtgttttgggtaaattgttatgtttaaatatgtaaataatttcggggggttatttttatttttgtgtttagttttgtataaagaggagattggatttaaaaatttatttattatttttattgatttttttaaattagatttttagaaattttagtgtatgagtttggttagtagatgttttttgagtaggaaatttgtgttagattagttggatgttattaaggtttaggttttgagttgaatataggaaaaattaatttttttttttttatatgtttatatttaatatttttttgattaattgtgtgaggttttttttttttttttatttatattaattaatttttttatattagttggatattttataatttaattttattgtgatattaattagagttaatatagatattaaaggttaaagatttagttttataagattgtttttattttagatattaattataagtagtaggtttttaaattatttatattttttgtttaatttgtttataaattagaggtttttatgattttttttttggggttggtaatttgttaaagtggtttatggaatttaggaaaagtttatttattattgtagattttttataaaggatattttaattgataataataattataaatatttatggggtggataatgatgttttagtatatgtaatgtatagtgattagattagattattattttatttattatttttttgtgttggaaatattttatattttttttttagcgatttgaaatgatataaagtattattgttaatgatagttattttatagtggtatagaatattagattataattttgtattttttaataaaggatattttaaagtatataaaggaatatttagatgaagagatattagatttggaagggttttaattataggagttttgtttttatagaattggggtattttattttttggtatgtggatgtgtttattaattgagaagttttttgaattttatagtttcgggatttttatggaggttttattatgtaggtatgattgattattaatttaatttttagtttttttttttttagggagtatgggggatgggattaaaagttttagatttttaattatgatttggtttttttggtgattagttttttttgtaggagtttattaagagtattttattagaataaaagatatttttgttatttaggaaattttaagcgattaggtattttatgttaggaattagggttaaagataaagttttgtgtagagtttttaaatatacgtttgtatgttttatatatttattatttgtgtatatttattatttatatatttatttatttattgttaggttagtagaagatattgatttgtttttttttttttggtttttttagg

SEQ ID NO: 2118 - DNA, 7076 bp, Artificial Sequence
  chemically treated genomic DNA (Homo sapiens)
tttagaggagttagggaagggagaataggttaatgttttttattggtttggtaataaataaataaatatataaataataaatatatataaataataaatatataaaatatatagacgtatatttaggagttttgtatagagttttgtttttgattttggtttttgatatagagtgtttaatcgtttagaattttttagataataggagtgttttttgttttaatgaggtatttttggtgggtttttgtaggaggggttggttattagaaagattaagttatgattagaagtttggaatttttagttttattttttatattttttgaaggggaaggggttggagattgagttaataattagttatgtttatatgatgaagtttttataaaaatttcggaattatggagtttagagaattttttagttggtaaatatatttatatgttaggaggtgaagtattttaattttgtggggatagagtttttgtgattgggatttttttagatttggtatttttttatttggatgtttttttgtatgttttaaaatattttttgttaaaggatgtaaaattatgatttagtgttttatattattgtgggatgattgttattaataataatattttatattattttaaatcgttagaagaaggatatggaatgtttttaatataaagaaatgataaatgagatgatgatttgatttgattattgtatattatatgtattaaaatattattatttattttatgaatatttataattattattattaattaaaatattttttgtaaaaaatttataataataagtaaattttttttgagttttataagttattttagtaaattattaattttaaggagggggttatgggaatttttgatttgtaggtaagttggatagaagatgtgggtaatttgggaatttattatttgtgattggtgtttgaaatggaggtagttttatgggattgagtttttaatttttggtgtttatgttaattttagttaatgttataatggaattgaattataggatatttagttaatataggagaattggttggtatgagtaaaaaaaaaaaaaaaattttatatagttggttaaagaagtgttgagtgtgagtatatagaagaaaaaaagttgattttttttatatttagtttagaatttaagttttggtgatatttagttagtttggtatagattttttgtttagggaatatttattgattaagtttatatattgaagtttttgaaagtttgatttgagggagttagtagaagtagtagataagtttttagatttagttttttttttatgtaagattaagtatagggataggagtagtttttcgagattatttgtatgtttaaatatgataatttgtttagaatatagatttttagtaaggtaaattattgagagagaaaaagggttaagagaaagagttagttttgtattgtgttggaaatattaaatatttatttcgtatatatttatgaagtatttgttgtatgtaaggtattgtgttaggagttgaggaggtagtaataaataagatgaatattgtttttgtttatattttagtagggaatatatattgtatagataattatatagattaattatattaaaattgttataaagtataaagtgttataggaatgtatattagggagataaattatttggggtgttaaatgtaattataaaacggaatatttttattttgaaataggagtaggggaagggagagtttttagaagaagtgtttttatttgtttttgtgtagtttaggttgagttttagtagtagcggtaggaatgtgattatgttttgttttgtaaagatgtcgggagtttagttttttggattagtttttttagggttcgtgggttttcgtttgttttagaagttttagtttgggtagatgatttttagatattgagtagaatattatattgttcgggttttttgattttttaaatgagtgatgtggggatatttagtttttagatattaaatttgttttttttagtttacgggagtttagtgttttaaatagggatagattggttaggtaggtagggataaatgtagagataaattattgagtgttttagtttagtattattagttattaggtaaacgttattttgttttagttttagataataggtttttttgttttttttaattttttttttgtagaataattagtagattttcgtagattattggagagaataatcgtaatatttttaggatgtatgtagtttgggttgtttattggtttaattttttttttttaatgtttttttaaaagattaggattagataattttttttattttttatagggaggttatttaagaagataattataaaaatttttgtttgttttgagatgagaggatttagagtttttttggggtaggtggtagaggtagggttgttgagaaggaagaaggtatagatagagtatagaattgtttggttttaaagtaagattgtagaataagggaagtagcgttattatggagattaggaataggggtttggaaaatttttttatgggtttttattgttgtttttgttttagttagttaagttttattttttttttagttataatagttgtttttcggagttagtaaattatatttttttatattttgagtaattttacggggtagatcgtaggttaatattttttagattttttgaaaaatagttggtgacgggttagtgtttagagtttatttgtttttcgttaaattttaaatatttttgtgtgttttttttattatattttgttttttgggggtaggtttttgtattatgaagttattaggaaaatgagataaagtttttttatttttttttttttgaaaagatagattttgttttttattttttgagaatattaagtaagattttattttttatttattttaaattattttaatttttgttttaggtttaagggtatatatgtaggtttgttatataggtaaattgtgtgttatcgggatttggcgtaaaaatttattttattatttaggtaataagtatagtatttgataggtagtgttttgatttttttttttttttattttttatttttaagtagggtttagtgtttattatttttttttgtgtttatgtgttttatgttagttttattataaagtgagatatgtagtatttattttttgtttttgtgtaggtttgtttaggataatagtttttagttttatgatgttgtaaaagacgtgagtacgatttttttagttgtggagtattttatggtgtatatgtattatattttttttatatagtttattgttggtgggtatttaggttgattttatgtttttgttattatgaatattgttgtagtgagtatttatgtgtatatgtttttatggtagaataatgtatatttttttgggtatatgtttaataatgggatttttgggacgaatggtagttttgttttaaggtttttgagaaattgttaaattgttttttttaatggttgaattaatttatgtttttattagtagtgtataagtttttcgttttttttgtaatttttttaatatttgttattttttgattttttaataatagttattttgattggtgtgagacggtattttattatgattttgatttgtatttttttaattattagtaatgttgaatattgttttatatgttttttggttacgtgtgtgttttgaaaaggtagattttatgtatttgcgtatttattttttttataggttttttttttgaaagttttattttgtcgtttaggttggagtatagtgggataatttcggtttattgtaattttcgttttttgggtttaaatgatttttatgttttagttatttgagtagttggggttatagttatgtgttattatttttggttagtttttgttttttttttttttttggtagagatagggttttattatgttggttaggttgtttttgaatttttgattttaagtgatttatttattttagttttttaaagtgttaggattataggtatgagttatcgtgtttggtttgaaaaagtagattttaaacggtaatttatttttttattttattgtgaattatatagttgatggattttttattattaatttgaaattttaaattggtttttttttgttttttagtaggttttagggttgtttttttatattttagtttttgagaatttttggattttattaaatagtgagttaaataaaataggattgtggaaggggttttttgatattatatttatttgtttttttttaaagtttttgattttaggaaaatttaatatttatgaagaaaatggggataaaaaatgtatataaagattattattaaaaacgaaagattcgttgtgtaattaattgagattaattgaagttttgttatagtttttagttattgtttttatttattttgtttatatattttaattttgttaacgaattgttaagtgtgttggaatgggtagaatatggggtggggagtgtataatttgtagagtttttatagatatagtgttaggtaggttttttttataatattttattttattttaaaagatttgttggtcgggtatggtggtttacgtttgtaattttagtattttgggaggttgaggaaggtatattatttgaggttaggagtttgagattagtttggtaaatatggtgaaatttcgtttttataaaaaatataaaaattagttgggtgtggtggcgcgtgtttgtaattttagttattttggaggttgaggtaggagaatcgattgaatttgggaggtggaggttgtagtgagtcgagatcgtgttattgtattttagtttgggtgatagaatgagattgttttaaaaaaaaaaaaaaaaaaaaaaaatttgttaattgtttttattttttaggttggaaaataggtttaaagatttatatttaaggtttaaaggttgtaatttttttttttatatagttgttatatatgtacgtgtgtatatatatatatatatatatatttttttgagtatgtttatatatttattatattttggaattgggatggtttaaataaagggagttagtgaggttttcgttgagaaagagagaaagagaagagttataatttataatttaatttatttaagttttattttttttgtttttagagttttttttgttttgagaattatcgttttttttatttttttttttgataagttttaaaattgaatttttttttatatttttttaatatattttttttttatatttttttttattttgtttaggtaagttgttagtttaattttataggaattaagttttgggattttttttaatgtttataaagtttagttttggtaagggagtattggttgtgtggttttgtgttagtattgaatatggttttagttagtaatagtggggttgaatgtagtttttttttatgtttagatttttgtttcggtagttaaaggagatgtgaaattttttgtgaggttataataggaaatggtaggagaggattttatttttttattaatttaaatattgagggagttttttagaataaagaaggatagaaaatttagatatttgtgtttagtagtgttttttttttttttttttttttaatttttttatttttatagatatagttttgtttttttatttttagttaatttaaaataatattttagttgttttgtttattgttatttatttgttaattattgatatagtatcgggatcgaagaggtatggagttttaattaggtttttatatgttgttttttttttattgtttttatataattatttaaagagtgagttttttttttttttattgtttttgtttttagtttgattattatatgtttgtagtaaattagttttagggtttgtgtgtaaagtattattgggaaaatatagagtgagaagatatggattttgtttttatatcgttttgtttgtacgttaattggggagtgagaataaatattttaaatagtttatattaaagtaagtaagtaataaggttagtggttttaaaagagaagagagaaattattatggatatggtagatagggagtatttttagtcgagagggtttggaatgagttttgaatattgggttggatttgtgttggagaggaggaaggtagttggtattgtaggtttggtgtatagttttataagtttgataatgttgtgaggtgttattagggaggaggtgttttacgagagtttgggttagttaaaataaagataagttataataacgttattggtattgtacgttggaggaagttataaatgtgattttttgtttttttttgagagtatggttataataataaattttttttaggtattttttaaagttgttttatgttagttcgtaggtttttggggtagacggttttaattgaagtttttattttataaatataaaattgtttaattagttaattacgttttatagtataagattatattcgtgattttagtgtttttttaaaattatatatatttatattttgttaagattatattatttgtttaatttgtttaatttttattttatttttgttatttattttttattttattttcgtttatatatatatttttttattttgttaggatttattgttttagattttgatttttggattatagtttttgtagttagtttattatttttttaatttatagttaaattatttgaattattagggatagtttatttgatttgttataattatttttttttttttaattttattttttgttattataattattgaagaatgttatttttattttatttacgagaaaatggaggtagagggaggttaagtggttgtttagatttatttagatattaagtaataaaattattatttgaatttaggatttattattttaaattttgtattgttaataattaattggaaaataattgaaaattgtttattatttataataataataaaaattatag

SEQ ID NO: 2119 - DNA, 15667 bp, Artificial Sequence
  chemically treated genomic DNA (Homo sapiens)
aaattttttggtttttttttttttgtagatgacggttgttcgaagtttttcgagattgtatatggttatgtggagtattcggttcgttattagtgtaagaattattataaattgcgtatagaaggagatggtaagatgtggataattgtttttatgttttatatataatttttttttttgatatttttatgatgggtggtgttgaggtgattcgttagaaagttcgttgttttttttggagttaggagatttagattttaataagcgttttgtcgttagtagttatggttttttgggtagattaatttttgttagttttaagttttttgttttgttaaggggaggcgatgttatgtagtttattttatgtaaattttagagttatatttatatttttagtagatgtgggaaaagaaggaatgttgatgatgatgttatttttatttagtgagttttgttgttttggtattgttttaagggttttatatttatttgtttatttagtttttatagtatttttttgaatagagtttattgtttttattttgttgataaggaaattgaggtatagataggttgagtattttgtttaaatttaggtagtttgtaagaggtagagttaggatttgaattttgagttttttttgtattgtttggttgtgatcgttatgattatagtgtgttttgttgggtttaattggtatttaggtatttggtttttagtatagtatttttttttttttttttttttatatatttttttttttttttttttttttttgtttttttttttttttttttttagtttttttttttaaatgtttttttattttgtacggggtttagatttgattttttttttggtttattttttgttttttgttttaggagtgtatattttaaataatgagaagtagtggataaataaggttgttggagataaattttttgaatgtgaagtaggtgggtgttgagtatttaagagagtaggtaggcgtttagcggggaacgttttagaggtatagttttttagtgcggttttttttgagtatataagagttaggaggagggatgtgggagaatcgtagttggttagggagagatttaagtagttaggtgatgattttttaagggttattaagggttttgtttattagggtttgaagggtattggttgaatttattgtttatatcgtttatagattaggagagtttgtgtatatagagagtttgttagagagttttgggtttaaggagaagtaagttttagggagaataagttaaggaatgatataaaattttaatttatggaagtttagtaggaggttggatatgggttggaatttttgtttttcgttattaggaggagttgttgttttttttttttatttttagaataagaggtaaaggtttagttttttttgtttttattggtgtggaaatgttaatttgtttcgtattaattgtattatttataaaatttgagttttagttagtgttgttttagatttatttttttttagagagaatgaattattgtagtttttagtttttttaatgaattttagggaattgtggaaatttttttattgggataattgtttaaatataatatagtttattagttagggtttaaaaattttagtattttttattttttttgttagaaaagtgggaaatagagttttttgtaatgtaaataatttaaaaaatagaattattttaaaattgtaattattggaaatgagattagtaggtggtaagggtaaagtatttaaatttttttattttacgtagtagtgatagtcgtttatgtttttattttttttttagatggaaaggtttttgtatatttttatttacgagtgttttgttttttttgatagtatgtgggaagtttaagaattcggtaaatttagtgtagcggattttgggtggatatttggatgttaaaggtagttttttttggtaggttaagatggttttttattataattttattataggtgttacgttgattaatgaataatggttgttgattacggttaaaaatttttttttgaattatttagaaaatgtaatagcgaaagatattgtttttattttaatattttatgtggggaaaaagtagtttgtagagattgagaaggttgttttatattttaattatttttaggtagatattgggtttattaaatttaaatagaaggtgtttgttaatgagagagtgatgtttatttgtttatttttaaaggattatgtagaagtagggcgtgtgggttatgtttttggttgggggcgaaatgttaattttaaatttattgattatttgaagtatgttatgttgtttgtggttgattaagattaatgtataaggtattatgaaggtagtatagttttcgaaaagaagatatcgaagagttttgtaggggtgtagtttatattgaatgaatatattttttgtgttggtatgtttaagtattaagaagatatttgttatggcgatgcgggtagtgtttttgtcgtttacgatttggaggaggatatttggtatgcgattgggattttaagttttgataagagttgtgttgtggttgagtatggtgtgtatgtgaaggtgatttttatttaggattgggtttagaagattatagttgagaattaatgtaaggttggtcggaagtttttgtttgaaagtaagattttagtttggaagagggtaaagtggacgggagtggataggagtggatgcgataagatgtggtttgaagttgatgggtgttagttttgtattgttgagttaattaataaagagtttttttttgatttatttttgtgttgtgtttagttttgagttttttttatttgtttttttatggtttagggtagttagaaggtatagagtttattgggagtatggtagaaaatattttaaatttattggaaatttcgaaggtgatataaatttttttattttagggaattatgtttattgattgagtgtttattgaatgttaggttttagaaagttaattgttgtttttgttttatagataaggaaatagagatttagagatggtaagtgagttgtttaaggttatatagttatgaaatagggaagtagaattttgaatttaggtttgtttgatataaatttagaggtttttttattgtatgttgttgtttttttaaagtgaattaggagaaaaggtatgggtttggttgaggaagaggttagtttaaaatgggatggggaaaaagtgttttaatatagatagtattttagagtttgggatttaatttattagtattttagaaaataaaagataatgatgtaaaggtaggatttttggatttattgagtttaaattatagaatggtttataaatttgttaagtaatttaggttttttggttattagtttttggttttttttatgaaggatttgagttaggcgatggttaatgtttttattagtaataattttttggtattttataaagagtggggaggtagagtttttgtattagtagaagttgttttttttattgggaataaatttattttgtattaggaattaaatgtaggttgtttgagtttttttttttgatggtaggttatgttattaagggttttttagaagaaaggttttggaattttgagaaatagaagtttttttaatagaatttttttttgttataagtttttaatattattaattattagtgtattttttttttatgttaaaatacggttttttttttgtagggtgtaaaacgatattgatgttatttttttttattaaggtttggttatttttgtgaagttttttttataggtattttgtagatttattaataaattttaataggttagcgttagtaggttaataagatgtatatttatattttagaatttgtgaaagaagtaatagttagaaattggaaaataatagttaaatttttaaaaaaatgttttttagaatatagttatttatatttttttttttggtagttttttttagtattaagttttttggaagaataagttattttttagtttttttaaagaattgtttgattgtattaagtaagtggtttttggtaaaataatggtaagagaaaagttttggtatttttttgattatttattttttttgtttttttttttagtaatattttttggttttagtttgtgggttttagtaatattaaattttatgttgttttttgataagttcggtcgtttttagtttttgggttttattttttcgggggttttttgttgaaatttttttttttttgttgtattagtattttttattcgtttttaatatgtaggtattgttttttttaaggagttatttgtatttacgtagttgtgagtataggatggggtatatagtaggtatttaataaatatttgtggaatggaaagaaattaagataggattaaaaatataaattaagatgtgagagaaagacgattaaaagtttttacgagggggttgggcgtgatggtttatatttgtaattttaatattttgggaggttaaggcgggtggattatttgagggtgggagtttgagattagttagagtaatatggagaaatttcgtttttattaaaaatataaaaaattagttaggtatggtgatatatgtttgtaattttagttattcgggaggttgaggtaggagaattgtttgaatttcggaggtagaagttgtggtgagttgagattatgttattgtattttagtttgggtaataggagtgaaattttgttttaaaaaaaataaaaaataaaaaagaatattacgggaaaattaagtgtgaagtaagagtttaatttttaataggggtaatgtttggagttttgttattggaaaagatagagattttattaggtttaaagtttgtagatataggaattacgaaatggagaagggggagaagtgagttagtggtagtataaaaagattagtagatgttttatagtattgtttttttagaggtaagattaattaagatgaggtgggtttatagtttttttttttgttttttttttggttttttattttagttttttttgtatatattggtatagatgtagaaatagaataaagaaatagggtaaatgggttaaattatagtgaattaaagggtttagtgtgttaaattttttttttttttgtatttatagaagatagtgttgttgttttttttaggagataagatttatttttaggagtgtttttttttttgaggttacgtttttgtttttgtagggtatgttattagttttcgtggtaggttttttggtattcggaatatatttattagtagatatttttttttttaaaaatgtataataagaaagattaatagtaatatatttgaatgatataattaattgattagtatttgggatatatattagtatttgggatatatttaattaagatatttagattttaaaaaataaaaagattttttgaaatgttgaaataataagattagaaatttttttttttgtgagatagagttttattttgttattaggatggagtgagtggcgcgattttagtttatcgtaattttttttttttcggtttaagtaatttttttgttttagttttttaagtagttaggattataggcgtgtgttattacgtttagttaatttttgtatttttagtagcgatgtggtttattatgttggttcggatgatttcgattttttgatttcgtgatttatttgtttcggttttttaaagtgttgggattataggtgtgagttatcgtattttgtttagaaattattttaatagaagtaaatagtgtttgaatggtgggcgtttgttagcgagatggtgaattggtagatggcgtttgtgtgttaatgtttatggttatcgttttgtttttagatattagtttttttttaggtaattttttggtattttggggtttgagatattattttttaaaggtgaattattataaaatattagaaataattatataagtgtttaaaattattgttaaatatagtaagaaatttttttttaaaagtttagtttgtttaagtttttttgttttttgttttttgtttttaaggttagatttttttattttttgtgttttttttattttggtaaataatttttttgttagtttttatttatatagtttatattttatatttgttatttattttgtgatttatttttttcgtcgtaatagttttttttattaaaattgattttttcgtttttttattagtgtaattatatttttgtattttgtaagttagttaatcgggttcggattgtgtagtttaattttagttaatggagttaggatatagtagtagggataagttgcgttagatataaaaatttttgtttttttttgtttagggtgttttcgtggtaattagatttattaggagttttattttgtaaaagtaaatttgttttgttgagagattttttgttttttggtttagtgttggtttttttttgtagtatcgagtatttgtttttaataaatttggtggtttatatagggaaaatattgtttttcgggaaagggtttttgattattttttgtgaggagatatattttattgttttgttgtagtggttttatgagtaaggaatcgagatttatttggtttgatgaataattttagatttttaataacgtggggagaaaaagatttgtaatattatggtggttaggtaattttgtgcgtagattaaggtaagaaatgtcgtaggagtgataaagtatttttttggtggttattatattttggtggttgaaagtttatgaatggtaataagtgttattgttgtgtggagtgaatgagtttaatttgtgggtttatggttattttatacggtttagttttttttgaaggattttgatgttggggtttatatagtttttttaatgttaagcgggatttaaaatatttttaggaggaaagtggttagagtggatgaagtaaaaggagaagagtgtgaagaatttttaggaggtggggttaaaagataggtaagaaatttttaatacgagggattgagttatagaaagttttagatagataaaaaagaaatttttaatatgaggaattgagttatagtaagtttttagtaggtaataaatttttaatatgagggattgagtttagttaagatttaatatgggaaatattttaagaaagatagagaataagaaggatgaaaatagtaataaggatatattttttgatagttttttaggttttatgttaaaatattggaaagataatgagaggattaagtataagaagaaggagtaaatgataaaatattgttgttttatttggatttaaggttttatttttaaatttttaattttttggttaaagtatgggtcgaatgagggtgtaatgagttaatttttaatttaatatgttaatgataaaagtttggttttttaagaagaattagattatgttttttgttggaagtagggatttgttttttttttttttttaaagataattagggaagaattcgatttagtattttaaattgagaagttagataagtcgatttttatatttaaagttagtatatgggattttttagattgtttttttttgtttattgttttaattttaatttttttattttttaggtagttgttgttgttttagattttattttagatttttttttaatttatgatgtttttttcgtttataattttgatttttaggggtagtcgttttaagagtttgtttattgttaatttaaatatttttttttaaaagggttttaatatgaaatagagtagtgtaaaaaggatatttagaattttttttttttttttatatttaaggagttagttataatttttttttttttaaaaggggtattataaggaggggaagttattggttttgtaaatgtttttttgattattttagaagtttgaggtttgaagaaagaatttaagttattgttagatgatttttatggagtggtagattaagttgattaatttttaggattttagttatatatttgggtcgagtaaatgtttattttaggtattttttttttaggggaggaaagaagtatgattcgtagggttgttatggtaatttgggaatatgaatatttttttggttaaaacgtttttattgtggattaaatatttgttgtttaagtaagatttttggtgggataatagtaatgtagtttattgagaaaatatgtaggatttaagggaaataataataaaaggaattagtgaatttatatttagaatttaaaagttttttaaagtatttgatatataataggagaaagatgagggatttataagatttttagatagattaaaggagtaaatgaagtaatatataggtttgaatttagaagatttttttgggtaaaggatgttaaagatttattttgttattaaaggttggttagatgttttaaaaaagttataaaaattggaggattgagaaaatcgatttttaagagaattttttagagaagtttaaaaggtgtatgtgaggagggatagggaaaaataaaaatagaagttaaaattaatgttatttattttttagtaggtggttttaaatttatatgttattaaatgaggtttttagggagttagaaattataaaaggttttaagttttttaaatttagtttagagaaattaaatttttagttagaggatttaagtttatattttttaggttttttaaagagtatagaaaagtaagattaaaaaattttaaaattgagagaggggaaggataagataagtgttataaatgtggaaggatagttttttttaaaagagaatgttttaaattagaaaaggagagagaagtttttttatttacgatttttgaagaggaatagggaagttaggggttttgtttatattattttgagttttattaggagtttttgataaatttggaggtgggatttatatatgagtttattatatttttggttgatttaggagcggtttgtttttttgtttgtttttttttatttaatgttgtttgttttttagaagaatttatagtttttgagataaaaggggaaggatttacggtgagaattttagaaaatatagaagttaagtattaagattaaataatttaggtttaatttttgttaatttttgaagtagtaattagtttgttaggaagagatttaatgttaaagttaggtataggtttataagttagtttaaagggattttttattttattaaatttatttattacggcggatgagaaatatatttattttgatgtttggttaagggaagaaaattgaggaaagtttcgaatttttttaatttatattaagttaaatatttcgtattgggaagtagtgaggaggaagtaattttttatttttttagagggtatgttagggttaaaatttataattgaaagttttattaatgatgggttttttgaattttgtatgtttttttataatattttaatattgtttgttaaaaaattagatgggttatatcggttggtgaaagattttagagttattaattaaatagtttagattattaattttgttgtttttaatttttatattatttttagtaaaattttatataattattaatggtttattgtaatagatttaaaggatgttttttgggtatgtttttggttgaagagagtcgagatatatttgtttttgagtgggaagatttttagttagggtgaaaataatggtattaatggatagttttgttttaggggtttatggatttatttaatttttttggttaaattttagaataagtgttagataaagtttttgttttaaaataattatgtttgttttaatatgtcgatgatatttttatatttggtgaggatatagagaaagaagttggtttttttatatatatttttgattatttatagttcgaggggttacgggttttaaagggaaagttttagtgtatggagtttaaagttaaatatttaggtcgtttaataagtgcgggtaagcgaaggatagggtttgaatgggtcgaaggaatcgtgtttttatttttgttttagattaaataggaatttaggaaatttttagggttagttggatattgtcgtttaaggattaatttatatgttttaaatagtaaatttttatattaaaaatttgtttagggaaaatttgagtattttttgtggatttttaaagaggtcgattaggttaaagagttaaaaggaatagtttataattgtttttgttttagttttattttttttagaaaatatattttattttttcgttagcgtgaaaaatggggtggttttaggggtgtttatttaagagtatagaggttgttggtagtttatggtttttttgttaaaaattttggatttggttatttgtggatggttttagtgtatttaatttattgtagttatagtagtattagttgaagagagtagaaaattaatttttgggtggagattaatagtaagtatattttattaagttagagagttattttaaataaaaaagtaggaaggtgattaattgattttagaattttaaaatatggggttattttattaaaaaaagatgagagaatatttatgtttagatttaattgattattaaataaaatttaggttagatttaggaaagattttttttaaaataggacggtatttatttatagatggttttttttagttgattgagggaaaaagatataacgggtatttagtaatcgatggagaaattttttatgtataagaatagagttaagaaaattgtttaataattggtttgtttaaatttgtgaattgtttgtatttagttaagttttaaagtatttgtaaaattaggaaggaattatttatattgattttaagtatgtttttggagtggtttatatatttggaaaaagttggattgaatgtggttttattaatagtaaaggttatgattttgtttataaggagttaattatttaagtattggataatttttagttgttagaagaaatagttattgttcgtgtattcgggtattagaaaagttttttttttgaaagtcgaggaaataatttaataaattagatagttaaataagttgttgtttttttcgaaatatttatgttttatttaattttttgtttttttttttttattgtaatttttttttttttttttattgaaaaagaagaataaagataggagttaaaggagaagattagaatgaaaacggttgttattagattaaaaggaaatgttatttaagttcgttatgtggaagatttagttttaattatatttgaggatatattggggattttaagttatgtgcgatgtagtttttagggtttatggatgtataagaatttatattttagttaaataagttatagatagttgtttaatatgtaaaaagattagtaagtagattttaagaaaatcgttttttggagaaagagatttagggttaagattatttttaagtgtttaattaattatattgaaatgtttttaattggttatttaaaatatttattagtaataatagattattttatttattgggtagagattattttatatttaaatgtaattattagtaacgtagttaaggtattaattgaaaatattgtatttagatttggattaatataaagtattgatttagataatggaatttattttattgtatatgttattaaaaagttagtttaggtattagatataaaatggaaaaattatattttttggtattttttttttttaagaagagtagaaaggatgaattagattttaaaaagttatttaattaaattagttttagaaatttgattgttatggattaaatgtttttttattgttttgttaagaattcgaattgttttttagagagatattggtttttttttttatgagatgttttatggattgttttatttatattttattgttaatatttttatatttaaaataaaagattagttttttaaaaattatatatttggtttatattttattttttttttttttaagattaaaggttttttagtataggcgttatcgttggagtttttagtatattagcgttagtttggagattatgtttttataaaagggtggaaggaaggtaaatttaaattagtttgggaaggattttatttggtgtttttaaatattaagattgtagttcgaatagtagaatgaggatggattgattatattcgcgttaaaaaggcgttgttatttttaggattataaatcgttattttagggtttattttaattaaattaattttaaaaagggtttaataattatttgtttatttttttttttttttttaatagaaggttattttgttattaatgtaatttgggttaattattttttaattttttagtttgatgtttgtttagttattttgtgtggagataagtaagtttaaaggaagttgttttatgtagataagtatttatgtttatattataaaaagttaattaagtataagtatagaattttaaaaagtttttgtggtgattggatagatgtttggaaattatttagtatggagggtggatagttaggtttttttttttaaataagttatggggattaaaatagaaattttaattaatttatggttttattttattaaattgtaagttattgtagtgtaattttttattgttaattatagttaatttttaaataatggtttaagaatttattatatttaaatagtatggattaggagtaaatgttataaaataaaattttataaaaatttttaattattggttaataatgataattaaaaaaaaatttatatttagagtttgggaaacgagtggaatttaatattttttttaagtatagcgagtttagcgttttttttttatttttaaaataatttaattaaagtaacggttgtaaaggtaaaaaatttaaagtagattatagttttagagataggatgttaagatgtaaatgtttggttaaaatggattaaatattttatttgtattttaaataaatatgaatgttatgtttgtgtttacggtagattagaggtttagattgttttttttttatttagatggttttttaattgatcgggtataagttgtatggtagtttttttttaagattatatagtttggggtgataaattatgttaagttttttttttgttgttttttgaagtttaatattttgagggttagttttcgagggttattagttttcgttttttaatgttaattttattttgtgttttttataatagggagaaaatttggtgttttttggagttttaatgggatgtagtgagtttaagtttttttaagagtttatttattagtttgtttttagttattttcgagcggatgtatggtggtattgtggtggattattattggatattgtcgagtaattggagtagaatatgtattttaattttattggttattttttttattttggtattttattaattagaaaagatagaaattaaatattgtaaaataagagaggttttttatgggtttgttgatttttatatttatatagattttattggagtttaacgaggagtgttagatgaatttaaggtttaaaattagataattgtaggatttgaatttacgtttttttggtggttaattataaataaaaatgtgaattagataaattatatttattataattaatgatgatttttttttttttgacggagttttgtttttgttgtttaggttggaatgtaacggtatgatttcggtttattataatttttgttttttgggtttaagtaatttttttgtttcggtttttcgagtagttgggattataaatatgtgttattacgtttggttaattttgtatttttagtagagatagggtttttttatgatggttaggttggttttaaattttcgattttaggttatttgtttgtttcggttttttaaagtgttgggattataggtattagttattgtgtttagtttatgatttgttaattatattagagatgtttttaaagggatagttgaataattaagatttattagttaaatggtttgggaaaataaaatagtattagatatgatattagcgaaagagggtggagattgtgttattatcggaattcgatgttatatttttatttttaataatattattttaggtgggattatattaaaagtattataaggttttattgttttattaaatgagttagttaaaaattttggattaaacgatttttttataaatttaatgggaaattttttggtaaatggaagggatttatgtttttaatttttatgttttttgttattagaatagggttgtttatttttgtaggatgttgtgttatattttgtgttttaggattaatataaaagtttattgaaatagttttttttaaaattttttttaatttttttttttttcgttttagtgagtttttttttttagaagatttaagtagaataatagagttaaattatgttaaaagggtttaaagaaaaaatattgtaaaatatttaatagggggattgttaaatatagtaagaaatttttttttaaaggtttagtttgtttaagtttttttgttttttgttttttgtttttaaggttagatttttttattttttgtgttttttttgcgttggtaaataattttttcgttagtcgttatttatagagtttatattttatatttgttatttattttgtgaattattttttttattataatggtttttttcggtaaaattgatttttttgtttttttagtagtgtaattatatttttgtattttttaagttagttaatcgggtttagtttagattgtacggtttaattttagttaatggagttaggatatagtagtagggataagttgcgttagatataaaaatttttgtttttttttgttcggggtgttttcgtggtaatcgaatttatgaggagtaattttatgtaaaagtaaatttgttttgttgagagattttttgttttttgttttagtgttagtttttttttgtagtattaagtatttgtttttaataattatatatttaaggaatttttgattatggaaaattttaagaagtagagggaatagtatattaagttttttgtttttatttttgagttatttatattttattagaagtatttttggggtgattgagggaggttttttttttttggagggtttttgaattattgttaatgtatttttttgattgtagttagaaattgaggtttttatatttatgtatttttttatttttttttgaagtttttgtagaatttttagtaagatagagtttgttggaagtttggtatgtttagaagtagttaaagcgtgtatgtggggcggagggtgggggtaattttttggttttagtatttttatatattgatttttttttttggttgtttagtgggaggagtgtgtgtgtatgtatgtgtgtgtgtgcgtgtgtgtgtgtgtgtatatgtttgtgtgtgtggatgtatgtatgtgttgtgaagtagggagattagtttttcgtttttttttgttttttttttgtagt

SEQ ID NO: 2120 - DNA, 15667 bp, Artificial Sequence
  chemically treated genomic DNA (Homo sapiens)
attgtagagagaaaataagaaggagcggaaagttggtttttttgttttatagtatatgtatgtatttatatatataggtatgtatatatatatatatacgtatatatatatatgtatatatatatattttttttattaagtagttagaaaagaaaattaatatatggaagtgttaggattaagaagttgtttttatttttcgttttatatatacgttttagttgtttttgagtatattaagtttttagtaagttttgttttgttgggaattttgtagaagttttagagagggatagaaaggtatataggtataggggttttagtttttggttgtagttaggaaggtatattggtaataatttagaagttttttaggaaagagaaattttttttagttattttaaagatatttttaataaaatgtagataatttaaagatgggaatagagggtttagtatgttattttttttattttttgaaattttttataattaaagattttttaaatatataattgttgaaaataaatgtttggtgttgtaaagaagaattagtattgagataaaggataaagggttttttagtaaggtaaatttatttttgtataaggttgttttttataggttcggttgttacgagagtatttcgaataaaggaaagtagaggtttttatgtttaacgtagtttgtttttgttattgtattttgattttattggttagagttggatcgtataatttaagttgaattcggttggttaatttgaaaagtgtaggaatgtgattatattgttgggaaggtaggaagattagttttgtcgggagaagttattgtgatgggaggggtaatttatagagtgggtagtagatgtggaatgtgggttttatagataacgattggcgggaaggttgtttattagcgtagggagaatatagagagtaaggaagtttggttttgaaagtagggagtaaagaataaggaaatttaagtaagttgaatttttgaagaagaattttttattgtatttaataatttttttgttaaatattttatagtattttttttttaaatttttttaatataatttggttttgttattttatttgggttttttaaaagaaaaagtttattggaacgaggaggaggaggattgagggaggttttggggagagttgttttaatgagtttttgtattaattttagggtatagggtatgatatagtattttataagaataagtaattttattttgatggtaagagatatgaggattgaggatataaattttttttatttgttaaagaattttttattaaatttgtgaaggggtcgtttagtttagaatttttggttagtttatttgataaggtagtaagattttgtagtgtttttggtgtgattttatttggagtagtattattagggataaaagtatagtatcgggtttcgataatgatataatttttattttttttcgttggtattatgtttaatgttattttatttttttaggttatttgattggtgggttttaattgtttagttgtttttttaagagtatttttagtataattaataaattataggttgggtatagtggttgatgtttgtaattttagtattttgggaggtcgaggtaggtagataatttgaggtcgggagtttgagattagtttgattattatggagaaattttgtttttattaaaaatataaaattagttaggcgtggtggtatatgtttataattttagttattcgggaggtcgaggtagaagaattgtttggatttaggaggtagaagttgtggtgagtcgagattatgtcgttgtattttagtttgggtaataagagtaaaatttcgttaaaaaaaaaaaaattattattggttgtaataaatgtagtttatttaatttatatttttatttatagttaattattagaagaacgtggatttaaattttgtagttgtttgattttgggttttaaatttatttggtatttttcgttggattttagtggaatttatataaatgtgggagttaatagatttatgaggggttttttttgttttatagtgtttggtttttattttttttggttgatgaaatgttagggtgaaagggatagttaatggaattagagtgtatgttttgttttagttattcggtagtgtttagtaatggtttattataatattattatatattcgttcgaggatgattaagggtagattgatgggtaagtttttggaaggatttaagtttattgtattttattaaggttttaaggaatattaagttttttttttgttgtgagagatataaagtaaaattggtattgggaaacggaagttgatggttttcgggggttgatttttagggtgttgagttttagggaatagtagagaaagagtttgatatgatttgttattttaggttgtgtgattttggaagagaattattatatagtttatgttcggttagttagaagattatttgagtggaaaggggataatttgggtttttggtttatcgtgagtataagtataatatttatatttgtttaaagtgtagatggaatatttaatttattttagttaagtatttgtattttgatattttgtttttagggttatagtttgttttaaattttttatttttataatcgttattttagttgggttgttttggagatgggaggaggacgttgagttcgttatatttggagagagtgttagattttattcgttttttagattttgggtgtggatttttttttaattattattgttaattagtggttgaagatttttatgggattttgttttgtaatatttgtttttaatttatattgtttgaatatagtgggtttttgggttattgtttgggggttagttataattagtaatgaggggttatattgtagtggtttatagtttggtggggtgggattatgaattagttggagtttttgttttagtttttataatttatttgaaaaagggggtttggttgtttattttttatattgagtggtttttaaatatttgtttagttattatagggattttttaaggttttatatttatatttggttgattttttatggtatggatataggtatttatttatatgagatagttttttttgagtttgtttgtttttatataggatgattgaataagtattaaattgaaggattaaaggatggttagtttaagttatattgatgataagatgattttttgttggaaagaaaagaaaaaataaataagtgattattaagttttttttagagttaatttggttggggtgagttttggagtgacggtttatgattttggaggtggtagcgtttttttgacgcgggtgtgattagtttatttttattttgttgttcggattgtagttttagtatttaggagtattaagtagggttttttttaagttggtttgagtttgttttttttttatttttttatgaggatatggtttttaggttgacgttaatgtgttggaaattttagcggtggcgtttgtgttaggagatttttagttttaagggaagagaaagtagagtatggattaagtatataatttttgaggaattgattttttattttgaatgtaggaatgttagtagtggagtataaatagggtaatttatagagtattttataaggggaaaggttagtatttttttgaggagtagttcggatttttaataaggtaataggaagatatttagtttatggtaattaagtttttagaattaatttagttaagtggttttttagagtttgatttattttttttattttttttgaggaggagagatgttaagggatatggtttttttattttatgtttagtatttgggttaattttttaatgatatatgtagtgaaatgggttttattgtttgaattagtgttttgtattagtttaaatttgggtataatgtttttaattaatgttttaattacgttattggtggttgtatttgagtgtgggatagtttttatttagtaggtaaagtggtttattattattaataagtattttaaatgattaattgggggtattttagtataattaattgaatatttggaaatggttttagttttgaatttttttttttaaggggcggtttttttagaatttgtttattagtttttttatatattaagtaattatttgtaatttgtttggttagggtgtaaatttttatatatttatagattttgagaattgtatcgtatatggtttgggatttttagtgtgtttttagatatagttgagattagattttttatataacgggtttggataatatttttttttggtttagtaatagtcgtttttattttggtttttttttttggtttttatttttattttttttttttaatggaagagaaaaaggaaattgtagtaggggaaggaagataaggagttaagtgaaatataggtgtttcggaggaaatagtagtttgtttggttatttggtttgttaggttattttttcgatttttaaaagaaaggtttttttggtgttcgggtatacggataatagttattttttttggtaattgaaggttatttagtatttggatgattaattttttatgaataaggttatgatttttattattagtgaggttatatttagtttaattttttttaaatgtatgagttattttaaaggtatatttagaattagtatagatggtttttttttggttttgtaagtgttttaaggtttggttgagtgtaaatagtttataagtttgggtagattaattattaggtaatttttttgattttgtttttatatatagagaatttttttatcgattattggatattcgttgtgttttttttttttaattagttgggaggaattatttataaataagtgtcgttttgttttgaaagggattttttttagatttggtttgagttttgtttggtagttaattaaatttagatataggtgtttttttatttttttttagtagaatagttttatattttaagattttggagttagttagttatttttttgtttttttatttaaaatagttttttaatttggtggggtgtgtttattgttaatttttatttaaaggttaattttttattttttttaattaatattgttgtagttgtaatggattggatgtattgaggttatttataggtgattaggtttaaaatttttgataggaaggttatgggttgttagtagtttttgtgtttttggataagtatttttaaagttattttattttttacgttgacgaaaaggtgaagtgtattttttagggaaggtaaggttagggtaagagtagttataagttattttttttagttttttgatttgatcgatttttttagaagtttataggagatgtttaggttttttttgggtaagtttttggtataaaagtttattgtttagggtatgtgagttaatttttaagcggtagtatttaattaattttaaaaattttttgagtttttgtttagtttgaggtaagggtaaggatacgattttttcgatttatttaggttttatttttcgtttgttcgtatttattaagcggtttaaatatttaattttaggttttatatattgaagttttttttttgagattcgtaatttttcgaattgtagatggttaaaaatatgtgtagagaagttagtttttttttttatatttttattagatatgagaatattatcgatatattgaagtaggtataattgttttggaatagaaattttgtttagtatttgttttaaaatttgattaaaaaggttgggtgaatttatgaatttttgaggtaagattgtttattgatattattgtttttattttaattggggatttttttatttaaaggtaaatgtgtttcggttttttttagttagggatatgtttaaaaagtattttttaaatttattatagtaaattattgatgattatatggaattttgttgagaatggtgtaagggttggggataatagggttagtggtttggattgtttggttaatggttttgaggttttttattagtcggtatgatttatttgattttttgataggtagtattggggtgttataaggagatatatagggtttaagaagtttattattaatgagatttttaattataggttttagttttagtatgttttttaagggaatggggaattgttttttttttattattttttagtgcggggtgtttagtttgatgtggattgggagaattcgaagttttttttagttttttttttttgattaaatattaggatgaatgtattttttattcgtcgtggtgagtaagtttaatgaagtaaggaatttttttgggttgatttgtaggtttatgtttaattttaatattaagtttttttttaataaattagttgttgttttagggattaataaaaattgaatttgggttgtttagttttggtatttgatttttgtattttttaagatttttatcgtaaatttttttttttttattttagagattataagtttttttgaagagtaggtaatattagatgaggggaaataaatagaggaataggtcgtttttgaattaattaaaaatgtgataagtttatgtgtaggttttatttttaaatttattaagggtttttggtgggatttaagataatatagatagagtttttgatttttttgtttttttttaaaggtcgtgagtggaagggtttttttttttttttttaatttgggatatttttttttgaagggggttgtttttttatatttgtaatatttattttgtttttttttttttttagttttgggattttttggttttgtttttttatgttttttagggggtttgggaaatgtagatttgggttttttagttgaaggtttggtttttttaaattgggtttgggaggtttgggattttttatagtttttggttttttggaagttttatttagtagtatatgggtttggagttatttgttggaaagtagataatattggttttgatttttgtttttgtttttttttgtttttttttatatatattttttgagtttttttgagaagtttttttagaggtcggtttttttagttttttaatttttgtaatttttttgaaatatttggttagtttttagtgataaaatggatttttaatattttttgtttaaggggattttttaaatttagatttgtatattgttttatttgtttttttagtttgtttaggaattttataggttttttattttttttttgttgtatattaaatgttttagagagtttttgagttttgggtatggatttattgattttttttattattattttttttaggttttgtatgtttttttagtgggttgtattgttgttgttttattaggagttttgtttgggtagtaaatgtttggtttatagtaggaacgttttgattaggagggtgtttatgtttttaaattgttatagtagttttacggattatgtttttttttttttttgaaaagaagatgtttaggatagatatttgttcgatttaagtgtataattgaggttttaagaattgattaatttgatttgttattttataggggttatttagtagtggtttaagttttttttttagattttagatttttgaaatagttaagagagtatttataaaattaatgattttttttttttgtgatattttttttaaagggaagaaagttatggttgattttttaggtgtggaaagaaaaggggagttttgaatgttttttttatattgttttattttatgttggagtttttttaaggaaggatatttaggttggtaatgaataggtttttgggacgattgtttttgagagttagggttgtaagcgggaggaatattatgagttggggaagaatttgggatgggatttggggtagtagtagttgtttgaggagtaggggggttaggattggggtagtaagtaaaggaagatagtttaggggattttatgtgttgattttaggtgtgggagtcggtttgtttgattttttaatttgagatgttggatcggatttttttttagttgtttttaagggaaagaggaggataggtttttgtttttaataaagagtatagtttagttttttttgagaaattagatttttattattaatatattggattaggagttgatttattatatttttattcgatttatattttggttagaagattgagggtttgaggatgggattttgggtttaaatgaaatagtaatattttattatttgttttttttttttatgtttagtttttttattatttttttagtattttaatatgaaatttaggggattattaaggggtatatttttgttattatttttattttttttattttttgttttttttggggtattttttatattgggttttagttaggtttaattttttatattagggatttgttgtttgttggaggtttgttgtggtttagttttttatattaggaattttttttttatttgtttggagttttttgtggtttaatttttcgtattagagattttttgtttattttttagttttattttttggaggttttttatatttttttttttttgttttatttattttggttattttttttttaggaatattttaagtttcgtttagtattgggaggattatataaattttaatattaggattttttagagaaggttaagtcgtatgaggtaattatagatttatagattggatttatttattttatatagtagtagtatttgttattatttatgaatttttagttattagaatatagtgattattaaggaagtattttgttatttttgcgatattttttattttggtttgcgtatagagttatttggttattatagtgttgtaagtttttttttttttacgttgttgagagtttggggttatttattagattaggtgggtttcgattttttatttatgaggttattgtaataaggtagtgggatgtgtttttttataagaggtgattaaagattttttttcggaggataatgttttttttgtatgggttattaaatttgttggaaataaatgttcggtgttgtaaagaagaattaatattgagttaaaggataaagggttttttagtaaggtaaatttatttttgtagaatagagtttttggtaagtttggttgttacgagagtattttaaataaaggaaagtagaggtttttatgtttaacgtagtttgtttttgttattgtgttttgattttattggttggagttggattgtataattcgaattcggttggttaatttgtaaagtgtaggaatgtggttgtattggtgggaaggcgggaagattagttttggtgggagaggttattgcgacgggagaggtaaattatagagtgggtagtagatgtggaatgtgggttgtatgggtaaggattggtaggaaggttgtttattagggtaggggaaatatagagagtaaggaagtttggttttgaaagtaggaaataaaggataaggaaatttaagtaggttaaatttttgaagaagaattttttattgtatttaataataattttaaatatttatgtggttatttttagtattttgtgataatttatttttaggaaatggtattttaaattttaaaatgttagaaggttatttggaagagaattggtgtttgaaagtaggacggtggttatgggtattgatatataggcgttatttgttagtttattatttcgttaatagacgtttattatttaggtattatttgtttttattaaaatagtttttaggtagggtgcggtggtttatatttgtaattttaatattttgggaggtcgagataggtggattacgaggttaagagatcgagattattcgggttaatatggtgaattatatcgttattaaaaatataaaaattagttgggcgtggtggtatacgtttgtagttttagttatttgggaggttgaggtaggagaattgtttgaatcggggagggggaggttgcgatgagttgagatcgcgttatttattttattttggtgatagagtgagattttgttttataaaaaaaaaagtttttagttttattattttaatattttaaaaagtttttttattttttaagatttaagtgttttaattagatgtattttaggtattagtgtgtattttaagtattagttaattaattgtgttatttaaatgtgttattattagttttttttattatatatttttaaagaggaaaatatttgttagtaaatatatttcgaatgttaggaagtttattacgggagttgatgatatattttataaagataaaaacgtaattttaaggaaaaagatatttttgagagtaaattttattttttgggaaagatagtagtattgttttttatggatgtagaaaaggagaagatttaatatattaagttttttggtttattataatttagtttatttgttttgtttttttgttttatttttgtatttgtattaatgtatgtaaaaaagattgaaataaagaattagaggaaaggtaggagggaaagttgtggatttattttattttggttggttttgtttttggaagagtagtgttgtggggtatttgttggtttttttatgttgttattagtttattttttttttttttttatttcgtaatttttgtgtttataaattttggatttggtaaggtttttattttttttagtaataaaattttaaatattgtttttgttaagagttgagtttttgttttatatttgattttttcgtggtgtttttttttgttttttgttttttttgagatagagttttatttttgttgtttaggttggagtataatggtatgattttagtttattataatttttattttcgaggtttaagtaatttttttgttttagtttttcgagtagttgggattataggtatatattattatgtttggttaattttttgtatttttagtagagacgaggtttttttatgttgttttggttgattttaaatttttatttttaagtgatttattcgttttagttttttaaagtgttgagattataggtgtgagttattacgtttagttttttcgtgagggtttttgatcgttttttttttatattttgatttgtatttttgattttattttagtttttttttattttataagtatttgttaagtgtttgttgtatgttttattttatgtttatagttacgtaagtatagatggttttttagaggaggtagtgtttgtatgttgaaggcgggtaggaggtgttaatatagtaaggggaagggaattttagtagagggttttcgaggaaataaagtttaagaattggagacggtcgggtttgttagagagtaatatggagtttggtgttgttgaagtttataggttgaggttaggagatgttgttagggaggaaggtagagaagatgagtgattaagagaatgttagagttttttttttattattattttattagaagttatttatttaatataattagataattttttaagaaaattggggagtagtttgtttttttaggaaatttggtgttgaagagaattattagaggaaaaggtgtaagtgattgtgttttgagaggtatttttttaagagtttgattgttattttttagtttttggttattattttttttataggttttagaatataagtgtgtattttattggtttattggcgttaatttgttgaagtttattgatgaatttgtagggtgtttgtgaggagagttttatagagatggttagattttggtgagagagagtgatattagtgtcgttttatattttataaaggaggggtcgtattttggtatgagaagaaggtgtattggtgattggtggtattgaaagtttatagtaagaaaaagttttgttagaagagtttttgttttttagagttttagaattttttttttgggagatttttaatagtatgatttgttattaggagaggaggtttagatagtttgtatttgatttttggtgtagggtgggtttgtttttagtaggaaaagtagtttttattgatgtagggattttatttttttattttttatggaatattagaaggttattgttgatagggatattagttatcgtttggtttaagttttttatggaagagattaggaattgatggttaggaaatttaaattatttagtaaatttatgggttattttgtgatttggatttagtaagtttagagattttgtttttatattattgttttttgttttttggagtgttggtaggttagattttaaattttgaagtattgtttgtgttaaaatattttttttttattttattttgagttagttttttttttaattaggtttatgtttttttttttaatttattttgaggaggtaatagtatgtagtgaaaggatttttgagtttgtattaaatagatttgggtttaaagttttgtttttttgttttatagttatgtaattttaagtaatttatttattatttttgagtttttgtttttttgtttgtaaaataaggataatagttaattttttgggatttagtatttaataggtatttaattagtgagtatgattttttaaggtggaagagtttgtattattttcgggatttttagtgggtttagggtgttttttgttatatttttagtagattttatattttttgattattttggattataaaggagtaaataaaaaagatttaagattgaatataatatagaaatgggttaaaagaaagttttttattgattgatttagtaatgtagggttggtatttattagttttaaattatattttatcgtatttatttttgtttattttcgtttattttgtttttttttaggttgaaattttgtttttaggtaagggttttcggttagttttgtattagtttttagttatggttttttgaatttagttttggatggaagttatttttatatatatattatatttagttatagtatagtttttattaaagtttaagattttagtcgtatattaggtgtttttttttaggtcgtgaacggtaaaggtattgttcgtatcgttatagtaggtgtttttttggtatttagatatgttagtatagaaggtgtgtttatttagtatgggttgtatttttatagggtttttcggtgtttttttttcggggattgtgttgtttttataatgttttatgtattggttttggttagttataggtagtatgatatattttagatggttagtaaatttaaaattggtatttcgtttttagttagaaatataatttatacgttttatttttgtataattttttgaaggtaggtagatgggtattatttttttattaatagatattttttgtttgagtttgatgagtttaatatttatttgggagtagttagggtgtagaataatttttttaatttttataagttgttttttttttatatagagtgttaaagtaggggtaatgtttttcgttgttgtattttttgaatggtttaggaagagatttttagtcgtggttagtagttattgtttattgattagcgtggtatttgtggtgagattatggtgggaaattattttagtttgttagggaaagttgtttttggtatttaggtgtttatttaggattcgttgtattgggtttgtcggatttttgggttttttatatattgttaaggagagtaagatattcgtgagtggaaatgtgtaagagtttttttatttgagaaaggggtgaaagtatgggcggttgttattgttgcgtaaagtagaaagatttaaatgttttgtttttattatttgttgattttatttttaatagttgtagttttaaaataattttgttttttaaattgtttatattataaaaagttttattttttatttttttaataaaggaagtgggaaatattgagatttttgagttttggttggtgaattgtattatatttaaataattattttaataaaggaatttttataattttttgaaatttattgaaagggttaggggttataataatttattttttttaaagaaagatgaatttagagtagtattggttggagtttagattttgtagatggtgtagttaatacgaggtaggttggtatttttatattagtaagagtagaagaggttgggtttttgttttttgttttgagaatgaaaggagagagtaatagttttttttaataacgagaagtaggagttttagtttatgtttagttttttgttaggtttttatggattaagattttatgttattttttgatttgttttttttggagtttgtttttttttagatttagggttttttagtaggttttttgtatgtataggtttttttaatttgtgggcgatgtagataatggatttagttagtgttttttaggttttaatgaataagatttttggtgatttttagggagttattatttaattgtttaagtttttttttggttagttgcggtttttttatatttttttttttggtttttgtgtgtttagaggaagtcgtattggaaggttgtgtttttaggacgtttttcgttggacgtttgtttgtttttttaagtgtttagtatttatttgttttatatttaggaagtttatttttaatagttttatttatttattgttttttattgtttaaggtgtatatttttgaaataaaaggtaagaagtgagttaaaggagaagttaagtttagatttcgtgtagagtgagaaggtatttaaagagaagaattaaaaggaagaggaaaaggggataaaaaggaaggggaaaaggagagagtatatgagaaggaggaagggaaagagtgttgtgttggaagttaagtgtttggatgttagttaagtttagtagaatatattgtggttatggcggttatagttaagtagtatagggagggtttagggtttaaattttgattttgttttttataggttgtttgaatttgggtaagatatttaatttgtttgtgttttagtttttttattagtaaagtgaaaataataaattttgtttagagggatattgtgaggattaagtgagtaaataagtataaagtttttagagtagtgttaggatagtaagatttattaggtgagggtgatattattattagtattttttttttttttatatttgttggagatgtaaatgtgattttgagatttatatgaggtaggttgtatggtatcgtttttttttaataaaatagaaaatttgaggttgataaaagttagtttgtttaaagggttatggttattggcgataaaacgtttattagaatttaaattttttggttttaaggagagtaacgaattttttggcgaattattttagtattatttattatggaaatgttagagaagggggttgtatgtagggtatggagatagttgtttatattttattatttttttttgtgcgtagtttgtagtagtttttatattggtagcgaatcgagtgttttatatagttatgtgtaatttcggggggtttcgggtagtcgttatttgtaaagagagagaagttagagagttt

SEQ ID NO: 2121 - DNA, 6242 bp, Artificial Sequence
  chemically treated genomic DNA (Homo sapiens)
attattttattttagtttgaagttttttttttagtattttagtgtatgtttgttttagttagattttgtttatttgaaaatgaatttattttgattttttttgtaatggttattttttttaggtttagaattatatattagtagattttttttttttttttttattattatattgtaagttttgggatatatgtgtagaatgtgtaggtttgttatatatatacgtgttatggtggtttgttgtatttattaatttattatttatattaggtattttttttagtattattttttttttagttttttattcgttgataggttttggtgtgagatgtttttttttttgtgtttatatgttttaattgtttagtttttatttatgagtgagaatatgtggtgtttggttttttgtttttgtgttagttgttgagaatgatggtttttagttttatttatgtttttgtaaaggatatgaatttattttttttatggttgtatagtattttatggtgtatatgtgttatattttttttatttagtttattattgatgggtatttgtgttggttttaagtttttgttattgtgaatagtgttgtaataaatatacgtgtgtgtatgtgtttttatagtagaatgatttatatttttttgggtatatatttagtgatgggattgttgggttaaatggtatttttggttttagattattgaggaatcgttatattgttttttataatggttgaattaatttatatttttattaatagcgtaaaagcgtttttatttttttatattttttttagtatttgttgttttttgattttttaatgattatttttttaattggtgtgagatgatattttattgtggttttgatttgtatttttgtaatgattagtgatgaagagtttttttttacgtttattggtcgtattaatgtttttttttgagaagggtttatttttttttattattttttttttaattttatttttatattttattttattaagttgatttttagtttttgatatttttttttttatttgattgatttggttattgatatttgtgtatgttttatgaagttttcgtgttgtgttttttagttttattaggttatttatgtttttttatttggggttgggtttatagttttgtaatttttatgttaaatgttgatattttatagtaattggtagggataagtaggaaattgtttgataaataaatgtaaataaaaatgtatgttggtaatttttaagatatttttaaattattttgttattatttttaaagttaatttatttattaaagattttaagtaaatttaatatttgattagtttttttttttttttaataaagtattttatttgagtatttttatttttttttaattaataaataaataatttatttgagtatttttatttttttttaagttaattaattatagtttttttatattttttaatagagaaatattgtgtacgtaatatataaatatatagatgtattaggtatatcgatagaagtatattttatagatttttaagatttttttttttttttttattttagatttgtaaatttttgattatttgtgttattgttttggtagttgtcggttaaatagttttaaatttgtatattaaaggaaattattagatgaaaaattagatagtaaaatttatattttaaggtatagagaggaaaaagtttggtggtgttaaagagagattaaaaatggatgtgaaattaaatataaaattatgaaaatttattataggattgtataaggagattagttttatttagatagagattttttatattttaattggatttttgagttttgggtagattttatattgaattttgggtttttaaaaagcgaaaattattatgaggttagattatattatgtttttatagtgtatttaaaaaattttttttaataaagatatttttatatgtttaaattatattattttttaagaattttagagtagtttttgttgtagtaattattttagtaaaaaaattaggtaatataatataaaagtaagtagtttaagagttgagatgaaaaaaaaaaaaagttgagatgaatttgtttgtttatatatttggggttttataaggaaatagaggttttttttttaaggggaatttggtatttttttcgttttttgtaaggaattttgggtattataaattatattaggttttttatgaagtagagggtgtaagagaaagaagatacgataaaagtaaatgaagaaaatagaagttagttaattaagaagaaaaaaatttttgtttaaaaagataaggttttaggagagaaaaaaataaaaaaaataaaattggaagttttttaaatataaatatatatatataggtatataatatatatatgttggatgttagtttttaattaagtttttaattattgagttttttaaaaataaatttttttaattttattattggttgggtatggtggtttatgtttgtaattttaatattttgggaggtcgaggtaggcggattatttgaggttagtttgagattagtttggttaatatggtgaaattttatttttattaaaaaaatataaaaatgagttgggtgtggtggtgtaggtttataatgttagttatttaggaggttaaggtatgggaattatttgaatttgggaggtggaggttgtagtgagttgagattgtgttattgtattttagtttggaatatagagttagattttgtttaaataaataaataaattttattattatattttagttaggattaattgttgttattttagaagtattaagtattaaattagaaagggtttaatttaggaattaaatttaggttgtggtggtggaaaaaaagaaggtagaatttttaggtatggaattgtagtgtggggtgatagatattattttttttggttggtttggttagtaaaaatgtggttttgttatgtaagaaaagttttttaagtagttaaaataaattttttttttttttttttttttgttagttgtttttttttttttattatattattttttgtgtgtgtgtgtgtggtggggaggggttgaaatttagttattttagaggttttattttttataatttggaatttttttttggtttcgattaagttagatagagttcgttaaatttaatgcgaaaaagataaaagaataaaaaatagaaataataataaaaaaattagttaagcgaaacgaaggattgggtaatttataaggttattgagtatattaatggtaaggagaaattaagattagttggttgttaattttaatagttaagataaattttaatttagttattttttagggatgggtttgaggttgaagattgttttttattattttagaagtagaggaagaaaattttttattttttttgtgggaagcgagtttaaattttataaacgagttatttgttttttattgttatggaagtaggaaaaaattattatttttttatgttggaagagagtaaagtatatttcgttttttaattttcgtttaatatataaaaggagttgtatagtaaaataaattagattttgattaaatttgggtagattagggattttttggagggggtgtttttaggttttagtaaattgttttattggtttgagttataaagatagtttaagttggtattaaggattgatagatttgttaaaggttagtggtatttttatttagaatttttttgtggttattaaaatgtgaattttgaatatttgagttagattttagttaatttaggaagtttattttgttgaatttaaggatgtacgtttatgatacggtcgtcggaggttttgatgatatgtgtttaaggtggttagagtatagtttggttttatacgttttagggagatatgagatattaattaatatatgtaagatgaatattggtttggttcggaagggcgggataatttaaagtaaaggtaggagggagtttttaggttataggtaaatatgagataaattattgtatttttttgagtttttggttagtttttttagaggtggtaattagatacgtatttattttagtgagttgagagatgattttgaatagaatgggaggtaggtttgttttaagtagtttttaatttgatttttttttttaagtttaatgattttgcggtttttaaatttattttttttttatatttttttttttaaattagatttaaggtttgttttgatgttaatgttggaggagtgtaaaaaggtatgtttaatttttattttttttcgaggttagaatagttttttaggttgaattttagggttttttggtaaaggagggagtttagttagacggttgcgggggagggggggtttcgaattttatgttttataggtattagcgttatttatttttttttaattttaaattttttttttttataatagaaacgttattattttgtttttatttatttagaagaaaggtagagggcgtatattgcgtagcgcggatgggaaagttaattgaattatttgcgggaagatagaggaggtggggggttttttaagttttagttattttgtggttcgtaggggttgtcgttttttaagtcgtgaatggtttaaattcgtttttcgttttaggtcggatttttgtttcgcgtttttttgggtcggattttaagtcgagttttttaatttcgcggttgggttgggcgattggggacgagttttatatatggagaatttggtttcgtttcgtaagatcgcgggacgcgtagatgtgaagtgcgtttgcgcggggcgtagttttagttgtagacgatttgtgagcgacgcgtcggcgtaagtcgagggcggtggtttggtttttttggaatgggggacgttttaggattgcgtttgcgcggggcgtcgggttttgggcggggttttttcggttgacggtttgcgtgtattgcgtttgcgcgggttgagggcggtggtttaggtttttggaaaggatcgtttattttttcgcgttggcggtgtggacgcggaatttagcggagaaacgcgattgaggtaggtgttttgatgggtagtttagatggttggattgtacgtaaggaaggataggttaggtgaggcgttttcgtattgcgtgtgcgtcgttggcggatagaggttttcgtttttttttgggattttcgagcgttttcgcgattttagttattttttttggcgtttaaacgggagttcggttttcgttatatttttttttgcgtgtcgtattttttttcggttattttcgtcgtttagcgttttttacggttacgtttattttattattatttttgttacgtttttcgcggttacgtttatttgtttggcggtttttgtttcgaagttcgcggcgttgttttagtttgattttttcgtgtttttgcgtttacgcgtggttttttcgttttttgttttttttttatttttttttattggttatttgttttaattttttatgattttgtttttttcgagggtattttaggagggtagggttttgcgcgtattgcggtttttatttcgatttcgttttagtttggatttaggttttttaatgaaaatataattatgtaaattagtaagtatttgtaattacgaatattataaaaataagttttaagtttggatttagaagtgaagtatgtattttaaataaagaattgttatgtaattttaaaaatatattgattttagagtagtgtgtggattatattattattggaaaaatacgaattgagaagaaggaaaagattggaagatgtagattttggtttttgttagtggaaatattgtaaggttttaggtagggatttttaattggaattaaagttattatatttttaagaaattaatgaatattgatttattgttttaagtcgatatttgatttaatagaaattaataggttttagtaaatgaataagattaatattttgtagattagtgaagaaaatatattatttgaagtttatgatttttaaatgtttttgtttttgtaaagtattgtaaatttttatttttatattaatttttatatatatatattttatttttatttggtagaggatattatgtatattagaagttaagtgaatttaattattaagtaatgtaataagtattttgtgtttttttttttttttaaaagtaga

SEQ ID NO: 2122 - DNA, 6242 bp, Artificial Sequence
  chemically treated genomic DNA (Homo sapiens)
tttatttttaaaaagagaaggagatataaagtatttgttatattgtttaataattgagtttatttaatttttaatgtgtatgatgttttttattaaatagaagtaaaatgtgtatgtgtgaagattagtgtagaaatgaaaatttataatattttatagagataaaagtatttaaaaattataaattttaaatagtgtgttttttttattagtttgtaaggtgttaattttgtttatttgttgaagtttgttagtttttgttagattaggtgtcgatttaaggtaataaattagtatttattaattttttagaagtgtgatagttttaattttaattaaaagtttttatttgggattttatagtgtttttattaataggaattaaggtttgtattttttagttttttttttttttttaattcgtatttttttagtgatagtgtaatttatatattgttttgggattaatgtgtttttaaaattgtatagtaattttttgtttaaaatgtatgttttatttttaaatttagatttgaagtttatttttgtgatattcgtagttataaatgtttattgatttgtataattatatttttattggaagatttgggtttaaattgggacggggtcggagtggaggtcgtagtgcgcgtaggattttgtttttttaagatgttttcgggaggaataggattatggagggttggaataggtggttagtgaaggggggtgagaagggggtaggaagcgagagggttacgcgtggacgtaggggtacgagagggttaggttgggatagcgtcgcgagtttcggggtaggggtcgttaggtaggtgggcgtggtcgcgaagggcgtgatagagatggtggtggggtgggcgtggtcgtagaaggcgttggacggcgggagtggtcgggaaggggtgcggtacgtagggaagggtgtgacggggatcgagttttcgtttggacgttagggaaagtggttgagatcgcgaaggcgttcggaggttttaaaagggggcggaggtttttgttcgttagcgacgtatacgtagtgcgaggacgttttatttggtttgtttttttttacgtgtagtttagttatttgagttgtttattaggatatttattttaatcgcgttttttcgttgagtttcgcgtttatatcgttagcgcggaggggtggacggttttttttaggagtttgagttatcgtttttaattcgcgtaagcgtagtgtacgtaggtcgttagtcgggaaggtttcgtttagggttcggcgtttcgcgtaggcgtagttttaagacgttttttattttagggaagttaagttatcgttttcgatttgcgtcggcgcgtcgtttatagatcgtttgtagttggggttgcgtttcgcgtaggcgtattttatatttgcgcgtttcgcggttttgcgaggcgaggttaggttttttatgtgtggagttcgtttttaatcgtttagtttagtcgcggggttggggggttcggtttggggttcgatttagaggggcgcggggtaggagttcgatttggggcggggggcgggtttgggttatttacggtttgggaagcgataatttttacgagttataaaatggttggggtttgggggattttttattttttttgttttttcgtaaataatttagttaatttttttattcgcgttgcgtagtgtgcgttttttgttttttttttggataagtggaagtagaatgatgacgtttttgttgtggggagaggaagtttggggttaaggagaaatgggtggcgttaatgtttgtaaaatataaaattcgaagttttttttttttcgtagtcgtttgattggatttttttttttattaggggattttgaagtttaatttgagagattattttggtttcgaagggaagtaagagttggatatgtttttttatatttttttagtattaatattaaggtagattttaagtttgatttaaaaaaaaaaatgtggaaggaaaataaatttgggggtcgtaaaattattaagtttaaaaggaaaagttaagttgggaattgtttagggtaaatttgttttttattttgtttaaagttattttttagtttattgagataaatgcgtatttgattgttatttttggagaggttaattagaaatttaagggaatgtaatgatttgttttatatttatttatgatttggaagtttttttttgtttttgttttgagttgtttcgttttttcggattaaattaatgtttattttatatatattgattgatgttttatgtttttttaaaacgtataaaattaaattgtgttttgattattttgggtatatgttattagggttttcgacggtcgtgttatgggcgtgtatttttaaatttagtaaaataaattttttaagttgattgagatttgatttagatatttaaggtttatattttggtaattataaagggattttgagtagaggtgttattgatttttgataaatttgttagtttttagtattagtttgagttatttttatggtttaaattaataggataatttgttgaggtttggaagtattttttttagagaatttttgatttatttagatttagttaagatttagtttattttgttgtataattttttttgtgtgttgggcgggggttggggggcggggtgtgttttatttttttttaatataaggaagtagtagtttttttttgtttttatgataatggaaggtaggtaattcgtttatggagtttgagttcgttttttataggaaagatgaggggttttttttttttgtttttagggtggtagagagtaatttttagttttagatttatttttaggaagtaattgaattggggtttgttttggttattaagattaataattagttggttttaatttttttttattattagtgtgtttagtaattttataaattgtttaatttttcgtttcgtttaattggtttttttgttgttgtttttgttttttgtttttttgtttttttcgtattgagtttgacgaattttatttgatttgatcgaaattaaaggaaagttttaaattatgagaagtgaggtttttgaagtggttaagttttaatttttttttattatatatatatatataaaaggtgatgtggtggggggagaaaaatagttagtaaaaggaaaaagaaaaaaaaaatttattttgattatttaaagggttttttttatataataaggttatatttttgttagttagattaattaaaaagagtaatgtttgttattttatattgtagttttatatttaagggttttgttttttttttttttattattatagtttgggtttagtttttaaattaagttttttttggtttgatatttggtatttttgaaatagtagtaattagttttagttgaaatatgataatgagatttatttatttatttagatagagtttggttttgtgttttaggttggggtgtagtggtataattttagtttattgtaatttttattttttaggtttaagtgatttttatgttttagttttttgagtagttggtattataggtttgtattattatatttagtttatttttgtatttttttggtagagatggggttttattatgttggttaggttggttttaaattggttttaagtgattcgtttatttcggttttttaaagtgttgggattataggtatgagttattatgtttagttagtaatgagattgaaaaagtttatttttaaggagtttaatggttaaaagtttaattaaaagttaatatttaatatatgtgtgttgtgtgtttgtgtgtgtgtgtttgtatttaaaaggtttttagttttgttttttttgttttttttttttttaggattttgtttttttgagtaaaagtttttttttttttagttgattggtttttgttttttttatttatttttgtcgtgtttttttttttttgtattttttgttttatgggaaatttaatatagtttgtaatatttagggttttttatagaaaacggagaaggtgttagattttttttggaggagaaatttttgtttttttatggaattttaaatgtgtaaatagataagtttattttagtttttttttttttttattttagtttttaaattgtttgtttttgtattgtgttatttaatttttttattaaaatagttattgtaatagaggttattttggagtttttaaggaatagtatagtttagatatgtagaaatgtttttgttgaaaaaagttttttaagtgtattgtaaaagtatgatgtagtttaattttataataattttcgttttttggagatttaggatttagtgtagggtttgtttagagtttagagatttagttaaaatatagggagtttttgtttaaataaaattggtttttttatataattttatgatagatttttataattttatgtttgattttatatttatttttaatttttttttagtattattagatttttttttttttgtattttaaaatgtaaattttgttatttaattttttatttaatagttttttttaatatgtagatttagggttatttagtcggtaattgttagggtaatgatatagatgattaagagtttgtaagtttaagatagaaaaaaaaaaagaggttttaggaatttataagatgtatttttatcggtatatttaatatatttatgtatttatgtgttgcgtatataatgtttttttattaaaaaatatagaagagttataattaattggtttaaagaaaaataaaagtgtttaaataaattatttatttattaattaaagaaaaataaaagtgtttaaataaaatattttattagaaaaagggaaagattagttaaatgttaagtttatttaaaatttttaataaataagttagttttaaaaatagtggtaaagtaatttagaaatgttttaagaattgttagtatatatttttgtttgtatttatttattaagtaattttttatttatttttgttaattattataaggtgttaatatttggtataggggttataaaattataaatttagttttaaatggaagaatataaatggtttgatggagttgaaaaatatagtacgagaattttatgaagtatatataaatattaatagttaaattaattaggtaaaagaaaggatattagagattgaagattaatttaatgaaataaagtgtgaagataagattagagaaaaaataatgaagagaaatgaattttttttaaaagaagatattaatgcggttaataaacgtgaaaaaaaattttttattattggttattatagaaatgtaaattaaaattataatgagatattattttatattagttagaaaggtgattattagaaagttaggaaataatagatgttggagaggatgtggagaaataggaacgtttttacgttgttagtgggagtgtaaattagtttaattattgtggaagatagtgtggcgattttttaatgatttagaattagaaatattatttgatttagtaattttattattgggtatatgtttaaaggaatataaattattttattatgaagatatatgtatatacgtatgtttattgtagtattgtttataatagtaaagatttggaattaatataaatgtttattagtgatggattggataaagaaaatgtggtatatatatattatggaatattatgtagttataaaaaggatgagtttatgttttttgtagggatatggatgaaattggaaattattatttttagtaattaatataagaatagaaaattaaatattatatgtttttatttataagtgggagttgaataattagaatatgtggatatagggaggggaatattttatattaggatttgttagcgggtggggggttaggggagggatagtattaggagaaatatttaatgtagatgatgggttgatgggtgtagtaaattattatggtacgtgtatatgtaataaatttgtatattttgtatatgtattttagaatttatagtataatgataaaaaaaaaagagaaaaatttgttgatgtataattttaagtttaagaagaatagttattataaaggaagttaaaataaatttatttttagataaatagaatttgattgaagtaaatatgtattaaaatgttaaaagaagaattttaggttaaaataagataat

SEQ ID NO: 2123 - DNA, 5376 bp, Artificial Sequence
  chemically treated genomic DNA (Homo sapiens)
tttatataagtagtaatttttttttgtatataggattttttttttgttagaattttttttttttaattttatatttgtaagggtatttgtttgttttttttttgttttttttttattaaagtttttattttttaaaattatttacgtgtgttcgtgttattttatttaatttagtgtaagaataaggattttagtgttattttatttatcggggttatatttggaatatattttaaaataatgtaatgaaagttatgtatgaaaaatttattgtaaatattatattgaaaaggtaaaagttggaattattttttttgaaaattggtataagataaagatgttttttgatattatttgtatttaatatagtattgaaagttttgggtaattaggttagagaaaggaataaaagatattgaaataggaagagaggaaattaaattatttttgtttgtaattaatatgattttatatgtatataaatttattattttagttttaaagttttttaagttgataaataatttgagtaaaattttataatataaaattaatgtgtaaaaattattagcgtttttatatattattaatagtaaagttaagagttaagttatgaataaatttttatttattatagttataaaaagaataaaatatttaaagtatagttaattagggaagtgaaagatttgtataggaagaattattaatataaattattatttaaataattaagagatgatataaataaatggaaagtattttatgtttatagataggcggaattaatattattaaatggttattttgtttaaagtaatttatagatttaatgttatatttattaaattattattaatattttttatagaattagaaaaatttattttaaaatttatgtgaaattaaaaaagagattgtatagttaaggtaattttaagtaatataattaaaattaaatttattatgttttttaattttaaattatattatagaagtatcgtaatttaaatagtatggtattgataaaagaatagatatatagattaaaggaatagaatggaaaatttagaaatatgattatatgtttataagtatttgatttttaagaaaatttataaaagtaatggtgaaaagattttttatttaataaatggtgttgtgagaaattggttagttatatagagaaaattgaaattggatttttttattattttatatataaaaattaatttaagatggattaaagatttaaatgtaaaatttaaaattataaaaattttagaagtaaatttaggtaaaattatttagaatataggtaggagtaaagattttttgaagaagatgttaaaagtaattgtgataaaagaaaaaattaataaatgatatttaattaaattaaagagtttttgtattagtaaataaattattaataaattaaatagataaagtatagaatgggaaaaaattgtaaattatgtatttgataaaggtttaatatttagtatatataaagaatttatataaatttataaggaaaaaataaagaattttattaaaaagtgggtaaaggatatgaatagataatttttaagatatatatatgtagataataaatattttaaaaagtttaatattattgatttttatagaaatgcgtattaaaattataatgagatagtattttaaatttgttagaatatttattattataaagttaaaaaataatagatttaggtgaggttttggagaaatagaaatgtttttatattgttggtgggaatgtaaattagtttagtattatggaagatagtgtggtaattttttaaagatttaaagatagaattattatttaattttattaattttattattgggtatattttaaaggattataaattattttgttataaagatatatgtatatgtatgtttattgtaggtatttataatagtatatgtatatttattgtagttatttacgaaagtaaagataatggaattagtttaaatgttcgttagtgatagattggataaagaaaatgtggtaaatatatattatagatttttatgtagttataaaaaaagataagattatgtttttgtagtaatatagttggagattattatttttagtaaataaacgttagaatcgaaaattaaatattgtatgtttttatttataagtgggtgagtggagtataggaggagggagagaagtaagaaatataattaatggatattaggtttaatatttgggtgatgaaataatttgtataacgaattttattatataggtttatttataaaataaattattatatagtgtatatgaatttttgaatttaaaagttaaaaaatatatgtattataataaatgaagttagtaaggtgttagaatataagattaatatataaaaattaattatatttttgtgtattattaataaatttttaataggggaaattttttaaaaatttgatttatagtagtagaaatagaataagataatttgaagtaaattaattttaaatatatataatatatattaaatattaatatataaaaaatattaaaaattataaaattttgttgtaggaaattaaagaagatttaaataaattgaaatatatgttttgtttatgtataggaaatttagatggaaatattttttaaatttgtttgtagatttaatatttttgttttagttttagtttgtttgtttgttgaaattttagtttgtttttttgtagaaataggtaaggtaataaaaatataagaaataaataatagttaaatagtttcgaaaaaaataagaagaaagttgggattatttattttttttaatttaaattttttataaattatagtaataaaaataatatggtattagaatatatatatatatataaatatggaacgaaattgagagtttaagaataaatttatatatttatggttaacggaatgttattaagagtgttaagaataattaatgaagtaataataatgtttttaataaattttgggataattagatggtaatacgtaaaaatattgagttggattattattttatagtgtttatataagttaatttaaaatgtattaaagattttaatgtagaagttaatattataaaggttttagaatagaggagaagagtatatttttgtgattttgggttagataaaatttttttagaggtaatattgaaagtataagtgataatagaaaaaagtaaattggataaagattaaattaaaaatttttttgtttaaagtttattattaggaaagagaaaagttagtttatagaattattttttataaaaattaaatatttgataaaagaattagataagattataattaaataaaaaaagataaattaatgtgaaaagagttaaaaattttgaatagatatttttttagagaaggtatataaagtatatgaataagttaataattttacgaaaagatgtttaatattattgtattattagtaatttaagaagtttaatttaaaattttatgagattttatatatattgtaatggttaaattagtaagttatgtaattatagtattggtgaggatatgaagaaattagaacggtattttattttagatggaaattaaatgatgaagatgttttggaaaagaaaagtttaaatttaaagtttttatataatttattaattttatttgtaggtgtatatatacgagaaatgatattaagtatgtatataaaaatcggtatataaatgttaatagtaatattataatagttaaaagtagaaattgaaatatttatttattaatgaatttataaaatataaagttgtattataatgaattattttgaatagagaaaaaagattttattatttgaaataatataggttttataattaattttatgaaatagaattttataattttaattttatgaaatagaaaaagtatgtagataaaattaggaaaaagaaagtagaaaattaagtaataatttttgaaataggaatatatatgtaatgtagtataataaatttatgaagtcgataatttagatgaaatggataaattgttaaaaaaaaaaacggaaatgttaagaatcgtataatacgaaataattgttaaattattaaattttaaggtatttttggtagtgtttttttaaataaaatttattatttgatttttaaaatttattttttgcgtattttttaaaaatatatggagaataaaaagatattatagtagtgaattgattaaaaaaaaatagaatagtaatgtagggggatttttgtttaacgggtgtaaaatattgtaaataaaattataggaaataaagtgtaatattttgttttgaaataaaatatcgtaataaagtataattttttttaaaaatagtatgatatttttatattaaaaaacggattattagtagtgtgttttttttgatttatggtacgtgtgtttagcgatgttgaaggtttattgtaatttgtttaggtttttgtgattattttaaaatttagggtgtttttaggtaatttttaagggatgtttattatgtgtagtaaaggttttatttaaaaatatttagtatttttttttttcgttttaaagtttaagttcgagttggtaaaaaatttaacgataaatgtgtttatttgaagtgtattgttaatgtaatagtttataagaatataaatatattgtatcggtattttgttttttaaacgttttgtgataggaacgttttcgagttgagaatttagtgagtttttagagaatgttagtaaatatttttatatgaacggatatcgtcggcggtttgttttggtaggaaaaaaaaaaggtgcgtttttacggatattttcgtaaaggaggaatttttttcgagaaatttttcgttgattagtattatagttttttacggtttttttttgtaatacgtaggcgtaatttgcgtagtggttttattttaaaaaagattcggttatattatttttattttgttttttcgttttgtcgtagtattgtttaatatgagtttagcgacggttttgtgattgtttttttttggtaaaatcgtttttgcgtttttagcgtttattttaggtgcggaaggttttataggtttggaaatagcgtcggaaaaatcgattcgcggagtgagacggttcgtattatattgtagggttcggaggttaagatggtggttgtaaaattaggatttttgacgattggtaagtagttacgggattaaagtaattttgaaatttttaagaaaatgaaatttttataggttttttagtaggaggaattagcgcgttattaaagataatgtgatttttattttatagt

SEQ ID NO: 2124 - DNA, 5376 bp, Artificial Sequence
  chemically treated genomic DNA (Homo sapiens)
gttgtaaaataagaattatattgtttttaatgacgcgttggttttttttattaaaaggtttatgaaaattttatttttttgagaattttaaggttattttaatttcgtagttgtttattaatcgttagggattttagttttatagttattattttgattttcgggttttgtagtgtggtacgagtcgttttatttcgcggatcgattttttcggcgttatttttaaatttgtgagatttttcgtatttgagataaacgttgaggacgtaagagcgattttattagaggaaaatagttatagagtcgtcgttggatttatattaaatagtattgcgatagaacgaaaaagtaagataaaaatagtatggtcggattttttttaaaatgggattattgcgtaagttacgtttgcgtattgtagggaaggatcgtaaaaggttgtggtgttgattaacgaaggatttttcggagaaaattttttttttgcggaaatgttcgtagaaacgtatttttttttttttttgttaggataaatcgtcggcgatattcgtttatgtgaaagtgtttattaatattttttgaagatttattgggtttttagttcgagaacgtttttgttataagacgtttaggaggtaggatgtcggtataatgtatttatgtttttgtaaattgttgtattaatagtgtattttaagtgggtatatttgtcgttggattttttattaattcgagtttggattttaggacggggaaaagaagtgttaaatgtttttgaataaaatttttattgtatatgataaatattttttaaaaattatttaggagtattttaaattttaaaatgattataaagatttggatagattatagtaaatttttaatatcgttaaatatacgtattataaattaaaagaaatatattgttaatgattcgttttttgatgtggaaatattatgttgtttttaagggaaattatattttattgcgatgttttattttaaaataagatgttatattttattttttataattttatttataatattttatattcgttaagtaaaaatttttttatattgttattttgtttttttttaattagtttattattgtagtatttttttgttttttatatatttttgaaaaatacgtaaaaggtaagttttaaaaattaaatggtagattttatttggaagggtattgttagaagtgttttaaagtttgatagtttgataattgtttcgtattgtacgatttttggtattttcgtttttttttttaataatttatttattttatttagattatcggttttatgagtttattatattatattatatatatatttttgttttaaaagttgttatttaattttttgtttttttttttttagttttatttatatattttttttgttttataaagttagagttatagagttttattttataaaattagttatagagtttgtattattttaaatgatgagattttttttttttgtttaagataatttattataatatagttttatattttatgaatttattagtaaatagatattttaatttttatttttagttattataatgttgttattagtatttgtgtatcggtttttgtgtgtatgtttagtgttatttttcgtgtgtatatatttataagtagaattagtgggttatatgggaattttaggtttaaattttttttttttaaagtatttttattatttaatttttatttaaagtggaatatcgttttagtttttttatgtttttattaatattataattatatgatttattgatttgattattataatgtgtatgagattttatagagttttgagttggattttttgaattattaatgatatagtagtgttgagtattttttcgtaaggttgttggtttgtttatatgttttatatattttttttggagaaatgtttatttaaaatttttggttttttttatattggtttgtttttttttgtttagttgtaattttatttgatttttttattaaatatttgatttttataaaaaataattttgtaagttggttttttttttttttaatagtaaattttgaatagaaagatttttaatttgatttttatttagtttgtttttttttattgttatttgtatttttagtgttgtttttgaggggattttgtttaatttaaaattataaggatgtattttttttttttattttaggatttttatagtattagtttttatattaaagtttttgatatattttgagttaatttgtgtaaatattgtgaagtaatgatttaatttaatatttttgcgtgttgttatttagttgttttagaatttgttggaaatattattattgttttattaattgtttttggtatttttgataatatttcgttggttataaatgtatgggtttatttttggatttttaatttcgttttatatttatatgtatgtatatattttaatgttatattgtttttattgttgtagtttgtggaaggtttgaattgggaaaagtgagtaattttaattttttttttgtttttttcgagattgtttggttattatttgttttttgtatttttattattttgtttgtttttatagagaaataagttggggttttaatagataagtaagttgggattgagatagaaatgttgaatttatagataaatttaggaaatatttttatttaagttttttatatatggataaagtatgtattttaatttatttaggttttttttggttttttgtaataaagttttatagtttttggtattttttgtatattagtatttagtatgtattatatatatttgaaattaatttattttagattattttattttatttttgttattatgaattaaatttttaaaagattttttttattaagggtttgttagtgatatatagaaatatgattaatttttgtatgttgattttgtgttttggtattttgttaattttatttattgtaatatatatattttttaatttttaagtttagaggtttatgtgtattatatgatggtttgttttataagtaagtttgtgtgatagggttcgttgtatagattattttattatttaggtattaagtttaatatttattagttatattttttgtttttttttttttttttgtgttttatttatttatttataaatgagaatatgtagtatttggttttcggttttggcgtttgtttgttaaggataatggtttttagttgtgttattgtaaagatatgattttgtttttttttatggttgtatagaaatttatggtgtatatttattatattttttttatttagtttattattgacgagtatttgggttgattttattgtttttgttttcgtgaatagttgtagtgaatgtatatatgttgttgtgaatatttgtagtgaatatatatgtgtatgtatttttataatagaatgatttataattttttgggatatatttagtaatgggattggtggggttgaatgataattttatttttaggtttttgaggaattgttatattgttttttataatgttgaattaatttatatttttattagtagtgtaaaagtatttttatttttttagaattttatttgaatttgttattttttgattttataataataggtattttgataggtttgggatattattttattgtggttttgatgcgtatttttataaggattagtgatgttgagttttttaagatgtttgttgtttatatgtgtatgttttgagaattgtttgtttatgttttttgtttattttttaatgaggttttttgttttttttttgtaaatttgtataagttttttgtgtatgttagatattagatttttgttagatgtatagtttataatttttttttattttgtattttgtttatttaatttgttgatggtttatttgttagtgtagaagttttttagtttaattagatgttatttgttaatttttttttttgttataattgtttttgatattttttttaagaagtttttatttttgtttatgttttgaatggttttgtttagatttgtttttagggtttttatagttttgggttttatatttaagtttttaatttattttgagttaatttttgtatatggagtaataaaaaggtttagttttaattttttttatatggttagttagttttttatagtattatttattaaatagagagtttttttattattgtttttgtaaatttttttgaaaattagatatttgtaagtatgtagttatatttttgggttttttattttatttttttggtttatgtgtttgtttttttattagtattatgttgtttgggttacggtatttttgtagtgtagtttgaagttgggaagtatgatgaatttagttttgattatgttgtttaaaattgttttggttgtatagttttttttttggttttatatgaattttaaaatagatttttttagttttgtgaagaatgttaatggtaatttaatgggtatagtattggatttataaattgttttgggtagagtggttatttagtgatattgatttcgtttatttgtgagtatggaatattttttatttgtttatgttattttttagttatttgagtagtgatttgtattaatagttttttttgtataggttttttatttttttggttagttgtattttaggtgttttattttttttgtggttatggtgaatgagagtttgtttatgatttggtttttggttttattattgatggtgtataagaacgttaatgatttttgtatattgattttgtattgtgagattttgtttaagttgtttattagtttaaaaagttttggggttgagatgatggatttgtgtgtatatagaattatattggttgtaaatagggataatttgattttttttttttttattttaatattttttatttttttttttggtttgattgtttagaatttttaatattatattggatataagtagtgttagaggatatttttgttttgtgttagtttttaaggaaaatgattttagtttttgtttttttagtatgatgtttgtagtgggttttttatatatgatttttattatattattttgaggtatgttttagatatggtttcgataagtggagtagtattaggatttttatttttgtattgaattgaataaaatgatacggatatacgtgagtggttttaaggagtggaaattttaataagaaagaagtaaggaagaagtaaataggtatttttatagatatggagttggggaagagggattttaataaagagaaaattttgtgtgtagagaaaagttgttgtttatatggg

SEQ ID NO: 2125 - DNA, 9265 bp, Artificial Sequence
  chemically treated genomic DNA (Homo sapiens)
ttttattaataaagggttgttttgttttaagggtttttttagatgttagatatataaaatttttaagttttagtgttataaattttatgtgaaaatttaggttgttggggagtttattttttaaagtttagtataaataaagttatataatagtaaatgatatatataaatagtaaaagtaatattatattttttatttggaaagaaaaaatattaatttttgaaaataggtagaaattgagggaaaagaatgattttaattggtattcgagattttgataatgttaatatttagaatattattaattttagtagtagtttgttgttttatttttttttttttttttttaataggttttgatttattttggagaggagtaggaagtaatatgagtaggaatttttgggaggttagaataattaatttgcgtatggtgagtaattgtttttttatattattttttaaaatagatatgttatttatttagaattatagttttggaagggaatttatgaatggtataggtgaggagattgtagattggtttaattgagtgattggttttagaatttagttaagtttattaagtaatacgaaagtattagatttttaaagattgaattatagtttttattataaatagttaatgttaaaaatgttaatattttttttttattttaaaagagtatttttaaaataggtttttatagttttgatagtgagaataatttgttttatttttatttattgaatattttaaaaataatttgtttattgttaattaagtttttttttttttttaggattgtcgaaagaaatataaagacgtaaaaaggaaaatgaaattaaaataataaatgttagttggttttgatattgaatgtgaataaggtttatttaaggaaattgatttagaaaatagttttagttgataaagaagaaattttagagtgaaggaattttaaaaatttggttgacggaatattattttggttgttatttttttttgtggaatttttttgtatttttttttaagtaattattttaaaaattaaatttaattttttataaaggaagaataagatagtttttgaaaatattttttgtatataatttttttgttttttattttgagtaattaatggatatttttttatgtaaggtttatatgaagtttttttaaataaatgagttaaagtatttgtattttttagtttaggttttgtgtgaattataggttatttgaaattttatttttgattatgttaaatatattttttattttgttatttttgtttaaattgataaattataagttaatattgagttttatatttgtgttttggtgaatggttaattgaaatataggatattttagattaatattatataagagttttgtgaggattaggagaggaagttaaatatagttattttgttattgtttttaggaattaaggaataatatttagatgtatattaattttaaaattttagttagattaaaagtttatgaaaaatattaagtgtttgaaagataggtagttataattaggagttaggattttgagtttaaatagggaaatagatttaatattatattaaataaattaatttgtttagattttaagatatacgttttttattaaaatgggttttgtatgaaatagtattatataggtcgggcgtgatggcgtatatttgtaattttagtattttgggaggttaaggcgggcggattatgaggaggttaggattttaagattagtttggttaatatggtgaaattttatttttattaaaaatgtaaaaattagttgggtgtggtggtttatatttgtaattttagttgttagggaggttgatataggagaattatttgaatttaggaggtagaggttgtagtgttgagattatgttgttgtattttagtttgggtaatagagtgagattttattttaaaaaaaaaaaaaaaaagaaatagtattatatagttttaagggattattattaagttatgatgtgtgtatttaaaattagtatttattgatttatttatgttgaatataaatttttaattgttgggattttatttggtgtgttaattattatgattttagggtttatgttttatgtttttttagtaagggtttaaggaattaaataatttgaagagtaattttggatttttaggtttttaaaattttagattttaaggagagtgtggataattaagtagtaggataaataatttatattttttatttttttttgatgtagattatatttgtattttattttttattgttgtatagtaaattattttagtaataattatttattttatgtataaatattgtaatttggttaatatttattagggattgttgatttgtgttgtgtgtttttattggggtggtttagttagggttacgggatttgtttttaagatggtttatttagtgtttgtttatgggtttttttatagtatagtaaaaaagttttaggagtaagtgtttttagaggtaggaagtagatgttgtttgttttttaaggtttggtttagaaatcggtttagttattttattgtattttataggtttaaattgatatatagtttaattagattgaaagggaggggatatagatttttattttttagtgggaggagtgttagaatgtgtggtcgtaatttaaattcggtatatgttttataagtagataaataagtaatattaagtagttttgtttattttttagtttttgttttttagatgaaattatttttagtaatttaatttttttagtatttatttttatgtttttatttaatatgtttatgttttgattttttggttttttatttttagatattatatattttgaaaaggtgaaaaaattatttatttttttagtttaagtaatatattttgattatagttaatttttttgttggaatttttttatttgtttaattttttttagatttagtttttttatattttttaattgtgggatatgatgaggtttttttttaaatagtttgattaattttttattttttaatttatagtgttttttttttttttttttttttttttttttttttgtttttgttatatgtttagataggttatagtattaggcgttattagtattagttcgtattttttattcgaagagaagattagttttttagtttattatagatagtttttttttttttttttttttttttacgtgtttattttatttaaagaaagttaaaatgtttagttaattgtggttattttagattgtgaggtttaatttcggttaatggagaaagggtataggggtagggtttgtgttagggataaaggttttcgtgtttttttgttttggtgtgtttttatggtgattggttaaggagaagtatttttttgcgtagaagtaaaattgttttgttgaaaattttttgtttgaatgtttaatttttttaggattttgagtattatttttaatataatagtattattaatataaatgttttttaattaaatttttaaataattagatttggtttattttatttttgtttaggagttttttgtttggttttatttgggttttttggataggtgataaaaatgaattgaataaggtggtaacgtgaggaatgtgaaaattttaaatatattttaaatatttttagttaattaataagatttgtagttattaaattatgtacgttatgtgagtatagttagaatattgagttatttatgatggaggatatgaaattattttaattttttatatagggttaagacggtaagtaaagttaaatatatgttgaatagattattaaaatgtttttaaatttaataagaaattgtattttatttattttaggttagataaattttttatatttttttaacggatataataggtagttacggaattatttttaatttggtaagatttagaattttttttagaggttttggggttaaagttcgaggtttattgttttttgtaaggttttagattttaattagtagattagtaaggtattaagtcgatttatagtaatgataataagtatgtaggtcgggtgtagtggtttatgtttgtaattttaatagttaaggaggttaaggtaagtagatcgtttgagtttacgagtttgatagtagtttaggtaatatagtaagatttcgttgttatagaaaatataaaaattagtcgggcgtggtggcgttagtttgtagttttagttatttggttagggatgaggtgcgaggattatttgattcggggaggttgaggttgtagtgagttatgatcgtgttattgtattttagtttgggcgatagaatgagatcgttttttaaaaaaagaaaaaaaaatcgtttgtgtaatgtttttattatcggaaatattttaagtaaaatataataaaatttttaaatttggttgttagattttttttttttttttgttattatcgttttacgtagttatttatgataggagaagcggttttggggtcggcggtttagggtttaaaagtataattattaaagttattttttcggaagttgttgtttgtcgttattaatttaggtacgaagtgtttagttagataaatattgataaaagtaaataagatgaagaatatgagtttcgatttcggcgtttttttttagtgggtcgttatttattcggaggtgtttataattcgagtgagatttcggtttatattattgtaacggatataagtagtacgtatagcgtcgtttttagcgttggttcgttttttacgtggaggcgtaaaattagtaagtattattgtcgtattattcgagttagtgggcgtaattatgttcggcgcgattaatcggcgtttggtttgttggtaggtgttaggtagcgcgtattgattggtcggtgcggagtttgttttttttattggatttcgtatttttagcgcgttgtattattttcgtgcgttcggttgtagcgtggacgtcggatgagttgtttttaggtttgttggttcgcggggttgtttaggtacgcgaggttttttaggtacgtttttttttttttgtaggattcggtttttaaagacgagggttacgtacgcgttataatttcgaaatagtagtataagatttaatttttaaaagagcgtgttttttcggggtttgtcgttcgttcgtttttagttttaggaatttatggtcgtttttttgaatgaggtagtgtttgaaatgagtaaaatttttttaaaatgatatatatagtataaattgatatagttgtgattttatgtataggtaatacgtatttttatatgttttaatttattatttttaatggttgcgagatatttattttattgatgtatcgtaatttattttagttattatgaatatttagattgtttttagttatttgtttggagaaataattattcggtgaatgttattgtatatatattttgtatatttgtatgagtatatttgtggagtttatgttaataggatataattaaattgaggaaacgtttgagacggttttatttttaggttatatttgatttaatagattatgaagatttgagaataaaaggagaaatagaaatggatttagaggagaatgaaaagggggaatagaaataggtttataggtaggatttatatgatttgatgattaattggttgtgtgtattttttgagtagtgttaggggtgatttaaaaatgttatgtttaagtaatgggaagaatattggaattattaatatagtagtttaaaagggaagtaattttggaaggaattatgaaattttaaataaaatatggttttagtgtgcgtttttaaaatatattgaggtaaaataatatgaagtaatgtgaataatatgtagttaatattagggagggtggtttcgaaattgttgaacgggaagttgaggttaaggtgatttgaaggagttgtggagtagcgaagagttaagggtttggattataataagagggaagtaaaggggatggtatttttttgtataataaggttgttgtgtaaggttaatttgttttgtttttgttttgtggttgttggatgttgttgtgtatggatagttttttagtggattcgatgggttatagtaattttgtgatttatgtatggaggttgtttttttttagtagttgttatagttcggtcgttggtatatgattttttttgaatagttaatgttgttatattgagtgtttatgtttgacgtaataatgtagtgatttttaatttttggggaaagtagagattttttaaaaaatatagtaaaagttgaatgagttggttaggtatagtggtttatgtttgtaattttagttttttgggagtttagggtaagaggatcgttttagtttaggagttgaagattagttagggtaatatggtaaaattttgtttttataaattattttttttttattaaaaaaaaaaaaaaaaaaagttgagtgtggtggtgtatatttgtagttttagttatttggcgggttaaattgggaggaatatttgaatttagggaggttaaggttgtagtgagttatgattgtgttattgtattttagtttaggtgatagagtgagttattgttttaaaaaaaaaaaaaaaaaaggaatgattttttttttagaaagtttaaattttatttttttaaaaataaaaatttagatagatatttttgaataattgttagaatagtgtaagagtggtgatgtttagattttgatgtgaatgtttattttttagggattttgttaaaatgtaggttttgattcgtaggtgcgaggtgaggttggtaagtttgtatttttaataagtttttatagatgtgggttatagtaggattagttttgaagagattagaatgtgttggtatttaaaggtttgttagtttttagataataattttataagttttagttggtttttgataaggtatataatgaatttaaataaattagtaaatgtataaatatttattttggtttttgaaaggttagaggttataataagagttgaagatttaaaatgttttaaattttttgtttaatattttttaatggtatattgtgattagaaatagttattttagttagttaaatagtttaattgtttttgttttgtttttttttaaattaaatttagaggtatttatatatttgaaaaattaatgagggtaaaagaaaatgaaagatattatttgttatagatttttttttaaatgataatttgaattaataatttgattagattatgatgtttttgatgtttttaaaattgtttgaggtatgtaggtgtttttttttgtagagttgattattttggtttgttgtggtttttgagtatttaagattttttattttttttgttgtttttttattagtaattttatttttttttgatttgatattgatttggaaagttcgttatttattttgttagaattgttaagtaaatataaatagattttgagaaggaaaggttttaagggtggtttattagatatttaagttatagattgattaagtatttttgtatgaggttattagtaaaatatttaaaaagatattttaagattttttttattagggattaaattagaaaggtatagggtttattttttataaaaattatgaataagtaataaaaagggtaaaatggaaaattggaatttatatttgaatgtgagatttttatttttttagttttaagattttttaagttttattagttttttttaaagagaagatgaagttattttaagagaattgatttttgttatgtgagtgtaggtaagaaaatttttaattattttgagatatttttttttagattattaatgagttttttgtattattagatagaatttttaagatttttttgtttatttttggaaatattgtttttattattattgaatattaaataatagttatgtattttttttttatattatatacgaaaataaaattatttgtggtttaaatgtaagcgaaaaatttataattttgtttaggtaatggtttattgatgatattaaaagtttaagtagtaaaattaaaaattgataaattgggtattattaaaatgaaaaatttttgtgttttaaaaaatgttattaagaaaataaaaagacggtttatagaataggagaaattttttataaattatatatttgataaaggatttgtatttaggatgtatatataatttttaaaatttaattataaaaagagtttaattagaaaataggtaaaggataaatatttatttaacgtggatacgtaaatggttaataagtatgtggaaagatgtttagtattattagtttttagggaaatgtaaattaaaattataagatattatttaatattttttagaatgattgtaatttaaagatggataataagatgtgttgggtaagatttgaagaaattagaatttttatttattgttgagggaatgtaaaatagtatagttattttggaaaaattttggtatttttttaaaaagttaaatatagaattattatgtgatttagaaattttatttttagttataaatttaagagaaatgaaaatatagatttatataaaattttgtatgtgaatgtttatagtagcgttattcgtaataattaaaaagtggaaataatataggtatttaagaaatgatgaatggataaataaaatgtggtatatttatgaaatggaatattatttagttattaaaagtaatgaagtatgaatatatattatattatggatgagttttgaaaatatgttagagaaaggaaattagatgtaataggttatatatagatgatttttataaatttttttatttatatgaaatgtttagaataggtaaatttgtagggatagaaagaagataaatcgttgttattggttatggagaagaaagaatggggagtgattgttaatggttttggggtgttttggtggggaggggaggttgaaaacgttttgaaattaggtattattagttatattattttgtaaatatattaaaaagttattgaattgtatattttttatattatattatgtaaattgtatattaataaagttgtaattttttaaaagtatggatagtgttatgtatatttatgttaataatatggtattttgttatttttagattttttttttgatagtaataaatttgattttttttgtagt

SEQ ID NO: 2126 - DNA, 9265 bp, Artificial Sequence
  chemically treated genomic DNA (Homo sapiens)
gttgtaaaagaaattaaatttattattgttaaaagagaaatttaggaataatagagtattatattattaatatgggtgtatatgatattatttatatttttaaaaaattatagttttattgatgtataatttatatagtgtaatgtaaaaagtgtataatttagtggttttttagtatatttataaggtagtataattagtaatatttaattttaaaacgtttttaattttttttttttattaaaatattttaaaattattagtagttattttttatttttttttttttatagttagtggtaacgatttattttttttttgtttttgtagatttatttattttggatattttatataaatgggaaaatttataggaattatttatatgtggtttattgtatttggttttttttttttagtatgtttttaaggtttatttatgatgtaatatgtatttatattttattatttttgatagttgaatagtattttattttatgaatatgttatattttgtttatttatttattattttttggatatttgtattgtttttattttttggttattacgaataacgttgttatgaatatttatatataaaattttgtgtggatttatgtttttattttttttgggtttgtagttagaagtagaatttttgggttatatgataattttgtatttaattttttgagaaaatgttaaaatttttttaaagtgattgtattattttatatttttttagtagtgaatgaggattttaatttttttagattttatttaatatattttattgtttatttttgaattatagttattttaggagatgttaagtagtattttgtggttttgatttgtatttttttaaggattaatgatgttgagtatttttttatatgtttattggttatttgcgtatttacgttggatagatatttattttttgtttattttttaattgggttttttttgtggttgggttttaagggttatgtatatattttggatataaattttttattagatatatgatttataaaaaattttttttgttttgtgggtcgtttttttatttttttgatggtattttttgaagtataaagattttttattttaatgatgtttaatttgttaatttttggttttgttgtttgagtttttggtgttattaataaattattatttaaataaggttatagatttttcgtttatatttaggttataaataattttattttcgtatatggtgtgagggaggggtatatggttattatttaatatttagtaatggtagagataatgtttttaaaagtaagtaggaaaattttggaaattttatttagtggtgtaaaaaatttattaataatttgaagaaaaatattttaaagtagttaagaatttttttatttatatttatatgatagaaattagtttttttgaagtaattttattttttttttgaggaaaattggtaaaatttaaaaaattttaaagttaaaaagatgagaattttatatttaaatatagattttagttttttattttattttttttattgtttatttatgatttttatgaaggatgagttttatatttttttggtttagtttttaatgagagaagttttaaagtgtttttttaaatgttttgttaataattttatgtagagatatttgattaatttatgatttaagtatttagtgagttatttttgagattttttttttttaaagtttatttatatttatttaataattttaataaggtgggtgacgagttttttaagttagtattagattagaaggggataaaattgttaataagggaataatagagaagataaaaaattttaagtatttaagaattataatagattagggtaattaattttataggaaaagatatttatatattttaaatagttttgaaagtattaaaagtattatagtttaattaagttattgatttaagttattatttaaaaaaaagtttgtgataagtagtattttttatttttttttatttttattaattttttagatgtgtgagtgtttttgagtttaatttaagaaaaaataggataagaatagttgggttgtttaattaattgaaatagttatttttgattatagtatgttattaaaaggtattaaatagaaggtttaaggtattttagatttttaatttttattataatttttagttttttaaggattaaaataagtgtttgtgtatttattgatttatttaggtttattgtgtattttattagaggttaattgaaatttatgggattgttatttgaagattaatagatttttagatattaatatattttaatttttttaaggttggttttattatggtttatatttatgggagtttattagagatgtagatttattagttttatttcgtatttacgagttagaatttgtattttaataagatttttaggggatgagtatttatattaaagtttgaatattattatttttgtattgttttaataattatttaggaatatttatttgaatttttatttttgagaaaataagatttaagttttttgagaagaggattattttttttttttttttttttttgagatagtggtttattttgttatttaggttggagtgtagtggtataattatggtttattgtagttttgatttttttgggtttaggtgttttttttagtttagttcgttaagtagttaggattataggtgtgtattattatatttagttttttttttttttttttttggtggggagggggtggtttgtagagatagggttttgttatgttgttttggttggtttttaatttttaggttaaagcgatttttttgttttgggtttttaaagggttgggattataggtatgagttattatgtttggttagtttatttagtttttattgtgttttttagggagtttttattttttttaaagattaagaattattgtattattacgttaagtataaatatttagtataatagtattgattatttaggaagaattatgtattagcgatcgggttatggtagttgttgaggagaagtagtttttatgtataaattataggattgttatggtttatcgaatttattggagagttgtttatgtataatagtatttagtaattatagggtagggatagagtaggttaattttgtataataattttgttgtgtagagggatgttattttttttgttttttttttattataatttaggtttttgatttttcgttgttttataatttttttaggttattttaattttaatttttcgtttagtaatttcgagattattttttttgatattaattatatattatttatattattttatattattttgttttaatatattttagaaacgtatattaaaattatgttttgtttaaaattttataattttttttagaattgttttttttttaaattattgtattagtggttttaatattttttttattatttaggtatgatatttttgagttatttttgatattatttagaagatatatataattaattaattattaagttatgtggattttatttataagtttatttttgttttttttttttatttttttttaaatttatttttgtttttttttttatttttaggtttttataatttattaagttaaatgtaatttgaaagtgggatcgttttaaacgtttttttaatttagttatattttattaatatagattttataggtatatttatgtaaatgtataaaatgtgtatataatgatatttatcgaataattgtttttttaggtaaataattgaaaataatttaaatatttatggtgattgaagtaaattacggtatattaataaaataagtatttcgtagttattgaaggtaataaattaagatatataaaaatacgtattgtttatatataaagttatagttatattaatttatattatgtatattattttaaaaagattttatttattttaaatattattttatttaaaaaggcgattataaatttttgaggttggaaacgaacgaacggtaagtttcgaagaaatacgtttttttaaaaattaaattttgtgttattgtttcggggttgtaacgcgtgcgtgattttcgtttttgagggtcggattttgtagggaagagagggcgtatttgaggggtttcgcgtgtttggatagtttcgcgggttagtaagtttaaaagtaatttattcggcgtttacgttgtaatcgggcgtacggaggtgatgtaacgcgttgaaaatgcgggatttagtgaaggagataggtttcgtatcggttaattagtgcgcgttgtttgatatttgttaataagttaggcgtcgattggtcgcgtcggatatgattgcgtttattggttcggatggtgcgatagtggtgtttgttggttttgcgtttttacgtggaaaacgaattagcgttgagggcggcgttgtgcgtgttgtttgtattcgttgtagtagtgtagatcgaggttttattcgggttgtgggtattttcgggtaggtgacggtttattgggaaggggcgtcgaggtcggggtttatgttttttattttgtttgtttttgttagtatttatttgattggatatttcgtatttaaattgataacgataaatagtaattttcggagaggtggttttaataattatatttttgggttttgagtcgtcgattttaaagtcgttttttttattataaatggttacgtgaaacgataataataaaagggaaggaagggtttgataattagatttaaaagttttattgtattttatttaaaatgttttcggtaatgaaaatattgtataaacgatttttttttttttttttgagaagcggttttattttgtcgtttaggttggagtgtagtggtacggttatggtttattgtagttttaattttttcggattagatgattttcgtattttatttttggttaagtagttgggattataggttagcgttattacgttcggttaatttttgtattttttgtagtaacggggttttgttatgttgtttaggttgttgttaaattcgtgggtttaagcgatttgtttgttttagtttttttaattgttgggattataggtatgagttattgtattcggtttgtatatttattattattgttatgagtcggtttggtattttattgatttgttggttaaaatttggagttttgtaaagggtagtaggtttcgggttttggttttagagtttttaaaggaaattttggattttgttaaattgggagtagtttcgtagttgtttattgtattcgttagagggatataaaaaatttatttggtttagaataggtagaatgtagttttttattaagtttaggaatattttgatagtttgtttagtatatatttaattttatttatcgttttggttttgtgtgaaggattaaagtggttttatgttttttattatgggtaatttagtgttttgattatatttatataacgtatataatttaatagttgtaaattttgttaattaattgaaagtatttggaatgtgtttgaagtttttatattttttacgttgttattttgtttagtttatttttgttatttatttagagagtttagatagagttagatagagggtttttggataaaggtgaggtaggttaagtttaattatttaaaaatttgattgagaaatatttatattaatagtattgttgtgttggaaataatgtttaaaattttaaggaaattgaatatttaaataaaggatttttagtaaagtaattttatttttgcgtagaggggtgtttttttttggttagttattatgagagtatattagaataaaggggtacgagaatttttatttttgatataaattttgtttttgtattttttttttattggtcggagttgggttttataatttaaaataattatagttggttaaatattttaattttttttagataaggtgggtacgtaagagagaggggaaagggggaagggttgtttgtaatgagttagagagttagtttttttttcggataaggaatacgagttggtattgataacgtttggtattgtggtttgtttaggtatgtaataaaggtagaaaggaaagaggagaaaaagggaagaggggggtattgtgaattaaagaataaaggattgattaggttatttgaagagaaattttattatgttttatagttggaaggtatgggaagattaagtttagaaaaagttaagtaaatgaaaaaattttagtaaaaaagttaattgtagttaaaatatattatttggattgaagaggtgaataatttttttatttttttagaatatgtagtgtttggaagtgaaaaattaagaaattagagtataagtatgttaggtagaaatatggaggtaaatattagagaaattaaattgttgaaggtggttttatttggggagtaggaattggggggtgggtaaggttatttgatgttatttatttgtttgtttgtgaaatatgtgtcggatttaaattacggttatatattttgatattttttttattaagaagtgaggatttgtgtttttttttttttagtttggttgggttgtgtgttagtttaaatttgtagaatatagtgaagtgattgagtcggtttttgggttaggttttaagagataggtagtatttgttttttgtttttgagaatatttgtttttagagtttttttgttatgttgtaaggaagtttatgaataggtattgagtgggttattttagaaatagatttcgtagttttagttgaattattttagtgaaagtatatagtatagattagtagtttttagtgagtgttgattaaattgtagtatttgtgtataaaataaatgattgttattgagatgatttgttatgtagtaatagaaaataaggtataaatgtgatttatattaagagaaggtagaaagtgtgaattatttattttgttgtttagttgtttatattttttttgaagtttgaagttttggaaatttaggaatttagaattattttttaagttatttagttttttggatttttattaaaaaaatatagagtataagttttagggttataatggttaatatattagatgaaattttaatagttaagagtttatatttagtataggtaaattaataaatattaattttaggtatatatattatggtttaatgatagttttttggaattatataatattatttttttttttttttttttttaagatggagttttattttgttatttaggttggagtgtagtaatatgattttagtattgtaatttttgttttttgggtttaagtgatttttttgtattagtttttttagtagttgggattataggtgtgagttattatatttagttaatttttgtatttttagtagagatggggttttattatgttggttaggttggttttgaaattttgatttttttatgattcgttcgttttggttttttaaagtattgagattataggtgtgcgttattacgttcggtttatgtaatattattttatatagagtttattttgataggagacgtatgttttgaaatttaggtaggttggtttatttaatgtaatgttaaatttgtttttttatttgggtttagggttttgatttttaattgtgattatttattttttaggtatttggtattttttataagtttttagtttaattagaattttgggattggtgtatatttagatgttgttttttaatttttagaggtaatgataagataattgtatttggtttttttttttggtttttatagaatttttatatgatgttggtttgaaatgttttatattttagttaattatttattaaaatataagtataaaatttaatgttgatttgtaatttattagtttaaataaaaatgataaaatggaaggtgtatttgatataattagaaataaaattttaaatagtttataatttatataaagtttaggttggaaaatataagtgttttgatttatttatttaaaaaggttttatataaattttgtatgagaagatgtttattagttatttaggatagagggtaaagagattatatataaaaagtatttttaaggattattttgttttttttttataagaagttgaatttaatttttgaagtaattatttaggaagaaatgtagaggagttttatagaaaaagatggtaattagaatgatatttcgttagttagatttttaaaatttttttattttgaaattttttttttgttagttaaaattgttttttgggttagtttttttaggtgagttttgtttatatttagtattaaaattagttgatatttattattttggttttatttttttttttgcgtttttatgtttttttcgataattttaggaaaaaaaaaagatttggttagtaataaataaattgtttttaagatgtttagtagatagaagtaaaataggttatttttattgttagggttgtggaaatttattttgaaagtgtttttttgaaatgaagaggggatattggtatttttggtattaattgtttataatgggaattataatttagtttttaaaaatttgatgttttcgtgttatttaataggtttggttggattttgagattagttatttaattgagttagtttgtagtttttttatttatattatttatgagtttttttttaggattgtaattttagataggtaatatgtttattttaggaaataatatggagaaataattatttattatacgtaggttggttgttttggttttttaagagtttttgtttatattattttttatttttttttagaataagttagaatttattaggggaaaaagaagaaagatgaggtagtaaattattattaaaattggtaatattttaagtgttggtattattaaggtttcgaatattagttaagattattttttttttttagtttttatttatttttaaaaattagtattttttttttttaaatgaaaaatataatattgtttttattgtttatatatattatttattattatgtaattttgtttatgttaggttttaagaaatgagttttttaatagtttgagtttttatatggaatttatggtattaaaatttaggggttttatatgtttaatatttaaggaagtttttggaataaaataattttttgttgatgaga

SEQ ID NO: 2127 - DNA, 15548 bp, Artificial Sequence
  chemically treated genomic DNA (Homo sapiens)
gtgtagtggtttatttttgtaattttagtattttgggaggttgaggtaggtggattatttgaggttaggagtttaagattagtttggttaatatggtaaaatttcgtttttattaaaaatataaaaattcgttaggcgtagtggtatacgtttgtagttttagttatttaggaggttgaggtagaagaatcgtttgaattgaggaggtagaggttgttgggagtcgagattatgttattgtattttattttgggtaatagagtaagatttttttttttttttttattaaaaaaggtgaaaaagaatatgttgtatggaaaaattgtaagtgtagtttttaatggatcgttttgattagaataaaggagagaagggaggttttgggttaaggttatagagtttgtattataggggaaattaatttatgttttatttttaaataaattattatagtaaaaaagttgaaattaaagtatacgaagtatttattatagggtgttatagttgtggtaaattttattaaagtataatttaattttattaaaatataatttaatgtttataataggttgtattaagatggggaagagtgaaaattttaggaaaggaggaagaaaaggaggggaggaaattgttaatgtgtttaaaaatttaattaaattttttagttattttgagtttattgttttaaatataaaaatgtattttattttaattagtttgtaagaatttttggatagtaggaaatggaaattttaatttaaatatgtagagtcgtttaaaaggtttttaaaataagtattattttgtaattgtaattaggaatttttttttttttatttggatttacgtatttttatggggtgtttttttatttttggtgttgttaaaacgaagtattgatatatttaaaattaaatttttaaatcgatgaatcgtaaagtgataatttaaagttttttaaacgatatttaatagttggatagattgtttaaaaattattatttatttaaattgggtgaattttaagatatataaattatatttttaagatgtttttaaaataggtatattttttttgggcgtggtgatttacgtttgtaattttagtatttcgggaagtaaaggtgagcggattattttaggttaggagttttagattagtttgggtaatatagcggaaattttatttttattaaaaatataaaaattagtcgggcgtaatagcgtatagttgtaattttagttatttaggaggttgaagtaggagaatcgtttgaattcggaaggcggaggttgtggtgagtcgagatcgcgttattgtattttagttcgggtgatagagtaagatttcgattcgaataatgtaatggaatatatatatatatgtatatatggaatatatatatatatgtggaataaatatatatatggaatatatatatgtggaataaatatatatatggaatatatatatgtggaattaatatatatatggaatatatatatgtggaattaatatatatatgtaatatatatatgtggaattaatatatatatgtaatatatatatgtggaattaatatatatatgtaatatatatatgtggaattaatatatatatgtaatatatatatgtggaattaatatatatatgtaatatatatatgtggaattaatatatatatgtaatatatatatgtggaattaatatatatatgtaatatatatatgtggaattaatatatatatgtaatatatatatgtggaattaatatatatatgtaatatatatatgtggaattaatatatatatagaatatatatatgtggaattaatatatatggaatatacgtatgtggaatatatatatgtggaatatacgtatgtggattatatatatgtggaatatacgtatgtggattatatatatgtggaatatacgtatgtggattatatatatgtgaaatatacgtatgtcgattatacgtatgggttttatatatatatgggatatatacgtatggaatatatatatgggatatatacgtatggaatatatacgtatatatatatatgggatatatacgtatggaatatatatatggaatatatatatatgggatatataagtatggaatatatacgtatggaatatatacgtatggaatatatacgtatggaatatatatgtatggaatatatacgtttggaatatatatgtatggaatatttacgtatggaatatatatttggaatatatatatatggaatatatatttggaatatatatatggaatatatatttggaatatatatatatggaatatatatttggaatatatatatatggaatatatatttggaatatatatatggaatatatatttggaatatatatatatggaatatatatttggaatatatatatatggaatatatatatggaatatatatatatggaatatatatggaatatatatatatggaatatatatatgtaatatatatatatggaatatatatatgtaatatatatatatggaatatatatatgtaatatatatatggaatatatatatggaatatatatatggaatatatatataatatatatacggaatatatatatacggaatatatatataatatatatacggaatatatatatacggaatatatatataatatatatacggaatatatatatacggaatatatatataatatatatataatatatatacggaatatatatatacggaatatatatataatatatgtatggaatatatatatacggaatatatatataatatatgtatggaatatatatatacggaatatatatataatatatgtatggaatatatatatacggaatagatatataatatatgtatggaatatatatatacggaatatatatataatatatatatatggtatatatatatggaatatatatatatggaatatatatatggaatatatatatatggaatatatatatggaatatatatatatggaatatatatatggaatatatatatatggaatatatatatggaatatatatatatggaatatatatatggaatatatatatatggtatatatatatggaatatatatatatggtatatatatatggtatatatatatatggtatatatatatatggtatatatatatggtatatatatatatggtatatatatatggtatatatatatatggtatatatatatggtatatatatatatggtatatatatatggtatatatatatatggtatatatatatggtatatatatatatggtatatatatatggtatatatatatggtatatatatatggtatatatatatggtatatatatatggttatagagatggtatatatatatggtatatagagatggtatatagagatggtatatagagatggtatatagagatggtatatagagatggtatatagagatggtatatagagatggtatatagagatggaatatagagatggaatatatatggtatatagagatggaatatatatggtatatagagatggaatatatatggtatatagagatggtatatagagatggaatatagagatggaatatagagatggaatagatatggaatatagagatggaatagatatggaatatagagatggaatagagatggaatatagagatggaatatagagatgggatatagagatgggatatagagatgggatatagagatgggatatagagatgggatatagagatgggatatagtgatggaatatagagatgggatatagagatggaatagatatggaatatagagatggaatagatatggaatatagagatggaatagatatggaatatagagatggaatatagagatgggatatagagatgggatatagagatggaatatagagatgggatatagagatggaatatagagatgggatatagagatggaatatagtgatgggatatagagatggaatatatagatggaatatagagatggaatatatagatggaatatatatatattttattgtattgttttttataaatatttatttaattatgtaattgttaattaattgtttggttgttataataacgaagtatttgattttttattttattttattatttaaattttatttcgtatatttttataatgtattggatttattattgaggaatttaattaaataattattcgaattatgggttcgaattgtttattgataaagttcgacgattaaaatagtttagcgattgttgtttggagtttttcggtttagggttcgtggttgttttttttaagggattatttcgttttttagttaagtcgttcggaaaacgagcgttcgatcgtttttgtttcgttttcgttttgtatatagtaacggtttggtcgtttagttattttttttttttagttttatttggtttttaggtcgttggggatttttaacgttattgtttaagattttagggttagtaagcgtttcgggcggagaagggcgaggacgaagagcgtcgggtcgcgattaggagtttattcgcgtttttcgattgtagatatggggaagagacgcgggaattttaaagtcgttgggtttgcgtaggtgtgtgtcgcgattttgtgaaggttaaggttttttgtgagggggagtcgttttggaatgcgatggtgaagtgttttagatcggttataggtcggaaagagtgaggaagaagagaatgtaggaggtttgcgatttttaaggcgcgcgcgtataggggtgttgtaattaggatggggtaatgggagtttggagaaggggtgttagttaggaggaaaggcgcgtgcgtggaggaacggcgcgtgcgcggaggggcggtgtgtgtgttagaagaggcggcgcgtgcgtagaggggcggtgagagttaagaggggtagcgcgtgtgtagaggggcggtgtgatttaggacggggcgatggcggttgagaggagttgcgcgtgcgcgaatatgtaattggtgggatttgcggcggtttttagatgatggtcgtttttttgggcgcgacgattttagtgttcgtcgtcgtggcgttatgggtgttgttcgtagtcgtaggtgagaggcggggaggagagttttggcgtagggcgggaggtagggtacgtagttgggttacgggggcggcgatgttgttgggggcgatagacgtttagtttgggaaattttcggtttattttgtcgcgttaaagattaaattcgatttgggttcgtaaattaattaggagaaagtggtgttttgggtttttttttgtcgtttgtttgtggtcgtgtacgggttttcgggagcgttcgggttttattttcgtgaaatggcggtgttagagttttgtgtcgagtttgatttttttcgggaaagtatcgcggtttcgttggtttgtttgataataaataaaatatttttcgaaatgtatttttttaatttggtgaataggcgtttagttttacgggggagtgagttaagtgtggttaggatttttttgtttttaggatttatataggttaataaaaaatgatagtcggagtgattgaagtataattgttagttttcgaggtttattaagtttgttttagggcgtattcgggaaaaacgtgagttataaatacgtttgtgattggttttttagaggtttttaggaggtggggtaggaaggtagtaaggtaaatagttttgtgagaatttagttagtgtttaagaaatttgtattttaagatattatgagtgttttgaagagaaaaagagagtaaagggagttagttatgtagatgtttttgggtagatggagttttgattttgttttgtatttgagaagataagtttgtaattgatatggttagtgtggaaggtttgaattagttttttagattaattttggaatgttatttgttgagaggagaggtttatttatattgttggggggtttagaattttatttttggtttatttaattatttattttttttttaaagaaataattatgtttaaaatttaatgaaatgttattttaatgagattgtaatgttgtttagttttttagaagttataaaaatagttatattttttaaattagtaaatgtaattttaggatttaagattaagaaaattgtttaaaatatgggaagatatttttatttatatttttttttttttttttttgagatagtttgttgtttaggttggtgtgtagaggcgtgattttagtttattgtaatttttgttttttaggtttaggcgatttttttgttttagttttttgagtagttggaattataggtgtacgttattatattcggttattttttgtatttttagtagagatggggttttgttatgttggttaggttggtttcgaatttttgattttaaataatttattttagttttttaaagtgttgggattataggtgtgagttattacgttcgatttatttatgttttagattttagttttaggaattagatttaggttgtagatttgaagttatagttggtatttttttgtttatgggagattagtaaagaattgatttatgaatgatttgttagggtagtttttcgtagatggttgagtttttttatttttttttggggatttggttgaagtataatgttagtaatagttattcgtttggaagagggtgttgtagttatttggtttttgggtttaattaattttttttttgcgtaagaaagttgggagaggttttgagattttttttttttttttataaaaataataaaagaaaaatataaaggtagggcgttattaggttaatttgttgaaattttttatatttatttgggatgtatgggggaatggtaattattataaggttgatagagagtgagaggtaattttgtagtgaggaggggtatttaaagagaattagggttagtattttagtgtaggagtttaggtggtttgtgagtttgtaagtgagtttaaaatattttatttgttggtttaggaaattatatatttgtgtggtatatgatattttattttttaaatttttttataaatatgtagtatattttttttaggatgtgggtattagggttttggtgtattttatagtaatttttttgaagttttttgtttatgaaaaatttgtattaaatttatgtttggtttgatgtgaaaaaagtttttttagaatttttatataaaattgatattttaggagggtgtgtattaagaaattaatttaaaattaggttagcggataggtggtaagatataatttataggtatttattattttttaagtttttagttgtgtgttaggtagtaatttaagtgttttaaaggtataaatttattaagtttttagagtagtgtagatattgttatgtttagttaatagataaggaaattgagtaacggagagattaagtaatttgtttgaggttgtataggttagttcgtggaggagtgggaagttaaattttgagtttggattaatagttttggggtttaattagattagattgtttttttaaaggttaaataatttaaatttttgattgtttatttgtatgttaagggtttaattattagtattttttagttaattgtgagtttaaaaatatttgagatcggtttgaaattaatttagaaagtttattttgttaaggttaaggatgtatttatgatatagttttaagaggttttggttatatgtgtttaaggtggttaaggtttagtttgtttttatatattttagggagatatattaattagtatatttaagatgtatatttgattggttcgatttggaaaggtaggataatttaaagtaaggtttttaggttataggtagatttaaagattttttgattggtaattggttgaaattaatggaaaggaatgtttgggatgttttaaggggttgtggagattaaaattttattatgtagattaagtttgtttaatttatagtttattggtcgcgtgtagtttatgatggttttgaatgtagtttaatataaattcgtaaatttttttaaaatatgaggggtttttgttttgtttgttttttttttgtttttttgtttgtttgtttttagtttattagatattgttagtgtattttgtgtgtggtttaagatagttgtttttttagtgtggtttacggaagttaaaaagagtggatatttttgatgtagatgaggtttgtagatagtaggttttagagagaatagattgtaattgttttttgtgaaatttaacgtttgtgttgttgttaatggtggttagttttttttgaattttagaagagaggagggtataatgaggtatatttaaattttatttcgtattatggtttgaagtagttttttaggttagttttggaatgtttttggttaggagaaggggtttattttgatggttgggggatttagaattttatttttggtttacgtaattatttattttttttttaaaaaaaattatgttgaaaatttaagattttaagtttatagtttaagttgattttgaaagttattttagtgagattgtaatgttgtttagttttttagaagttgtataaatgtattttttagtttagtaaatgtaattttaggattttagattaagaaaattatttaaaatatgggaagatatttatttatatatttgtatagatatttatatttggatttatgttagatttaaagatatagtaaattattttggtcgtgaaaatgaatgtgaaaggttgaaagtaattaaaattataaatgtattatatatatattagattaaatgtttatttatatatttatatgtggggtaattaattgttaatatattaatataaaatattttaatatattagtaaattaatatattgtatgttaatgttatataataatttatgaaaaaattattaaaaggagattgttaataataatagagtaaaatttgtgaaaattaaaattttgtttaataattttatttttaagtttttgtttatttattagttagttatttgttggttttttaaatgttaatatgtttgtaattttagggttttttttttttagtagtaaaggattttttttttttttgaggaaattattagttgtattttataatattttttatttttgttttaaggtttaaaattattagaattataatattttgtataagatattgtaaatattataaatgttattagattttttgttaaattttgtaaatttagttgttattttttggttgtatagaatttataaattttaataaatggatgagaattaagttaagaattttagagtgggataaggggatgtgatgtattttatttagggatgaagttttagagattttaagtatgaaatagaaaattgaggatggggagatttgatgggtattatattaagtttaaaaaaaaaaaaagtgtttttttagttgtttttttttttgattttatattataagatttaattggaaagagtaagaagttgttttagttaagaaagttttatataagaatttttgtggtagaataagtttataataagataatatgattgttttaaggtagaagtaaaagaaatattgtaggaattataaatgaatttaaaagttgattttttaaaaaatatataatttattaaagtgagagattagttttttatgatatttaaggagtttttgtgaatgtattattatgttggatattttgaaaaaatgtaaattaagtatgaagcgatataaattttgtttttaaggaatttgtaatttagttggagatttatgtttaatataaagaagtagtttttataaatattttttttgaggattttgggaagatggtagagtagaaagtattaggaatttgtttttttatttagataagaattgtattggtagaatttgatgtaattattttggaattttggagtttattgtaggtttgtaatttttaggggatagatttagatggtaaattgtagttaattttggtttatttgagtttttagtatagtagtagttatttattttttattttttaatttttagtagatagttgtgtacgttattagagtaatttgtatataatttataggaattaggtgggtaaaaagaaatatattatttagatatttgggatttgtgtttttgattggttattgttttttttcgttataaaagcgtaaagagatgggcggttgttgttgttatattttatttattgttataattttttttttatttatttttttgttttatggatttaaagggttagaaatttttttttgttttattttttttttttatttttgggagtcggatattaaagattaggatatttaaaaataattgtatttatggggaaaattagaaagttattgtatatatttagggaaaggtttaggagagattttaagtttatagtttaagttgatttttggtataggattaataataattatatagtaattaaataaagtaaatatatatatatataatgtagtttgggagagtgatgttagtaagatggttaattagaagttttttttgtttatttttttataagatagttagaataataaataaataattatattttagtaaatttaattaagagtgttagagtgtattaaagaagtaatagaaattttagtgagtagagaaaagtgggatggttatatggagaatgggaggaaatgttaggatttttaggattatttgggaacgaggaggaatttttttttatggtaaggagataaataagaagattttagttatattatgggtattaatagattttattattggggttttttagagtttagatagtaattaagttaagttgaggaagttgtttagagtttgtatagttgtgttttttttagagaaggagttaatattgtgttttatttgttgtggtttatatagttattgtgttattttattttggaattggaattatttttggagtgtgttttgtttcggggatttgtagttatggtttttttttatttgaattacgttaggttggtggtttaatatttttaagttaaattttaagtagttgttatatttttttttgtggagttaagtagaggtggaattattttatttatttttattttattgtttttgggttagagttgaagtagtattttattttttgggaatatattattttggttatttagagtagttatgtatttttgtgtttaagttgaagtggtatacggtattttagggaaatagggtttgaattatttagagtagttatatttttcgggttttagttgaaggagtatattattttttgtagaattagtgttttggttaaatcgagtagttatgtattttagggttgagttgatgtagtattttatgttttagggaaatagagtagtggttgagttgagatattttgttttataggttaaataattgtagtatttcgtttttttggagttggattagttttttagagtttgagttgttgagatattttgaggagtggagttattattgtgttgttttttattttttatttttagtttagataatagttatgttttattattttgtagtatttgttgttgttgttatatttggttttatagtttggggtattgtttatttttagttattttaagatttagagttatgattttatggtgttttattttttgggatttgtgttgttattgagttttattagtttatatttttaaattaaaattatattttgttttttaggtttaaatttttagagaattttttttttatagttaggttagtgttatgttttgatttttataggggtagaattaaagttataatttattttttgggtttaagttgttaggaagtatttttaggttataaattttggttttgtgagtaattacgtttaagttttgttatagagagtaaatttattttagtaattaagtgttttagtaggtttgtgagattttgagtttaggatttttgtttagtagttattttgaatatttttatttggaattaagagttgttgtagttgtatatatatagtttttgttagatttgatattaagaggtgttgttttggttgagtttttttattgtggggaagataagaataggaggattttaaaagtttttaatattgagaatattaataatttatattattattgttataaatttttgtagtttaggtttttgaggtatttatttattattgatattgaatataggtaaagtagttgttttattatattattgtatttgttaggaaatagttattatatttttcgaaattagtatattgaaatttaattgttaataaaagattttatttttgaaagttattgtttgtaaagtttggaagaggtaattattttattaatataaagatataaaaatatgaaaaagtaaggaaatatgatattattaaaggaaagtaagaattttttaatggtggtttaatgaaaagaagattaataaattgttggaaaaggaatttaaattaatgattttaaggaaatttaataagatataagaaaatatagatagtttaatgaattaggaaaataatttataatataaaaaatttaataaaaaaattaaaatatgatgaaaaataattaaataaattttatagttgaagaatttaatgaattatatttaaaaaatataataaagagttttaataatagatttggtaaagtagaagaaagaatttttgaatttgaagatatattatttgatattatttaattgtagaaaaaataagtgaaattttataagatttatgggatattattaaaggaataaacgtttatattatgtaagttatagaaagaggagaaaaggtaagaggtatatataaattatttaatgaaataatagttgaaaattttttaagtttggagagagatatagatatttagatttagaaagtttaatgatttttaaatagatttaatttaaaaaggttttttttaaagtatattattatttgttgttaaaagttaaagatagagaaagaattttaaaaatagtaagagaaaggtattaagttatatttaagaaaatttttatttagttaatagtagatttttttatagaaattttatagtgtagaagaggatgggatgatatatttaaatagttaagaatgttatgtttagtaaaattattttttaggaatgagggagaaatatagttttttttagataagtaaaaattgagggaatttattattgttagattagttttatgagaaatgttttagggagttttatatttggaagtgaaaagagagtagttagtattttgaaaatatggaaaagtataaaattttttgatagagtagatatataaaggagaaagagaaaagaattaaattttattaaattattaaattataatgataaataataagagaggaagaaaggggtaaaggatattattagaaaattttaataaaatgataaatgtaagggtttaaatattaataataattttaaatgtaaatggattaaattttatatttaaagagattggcggaatatttttttttttttttttttttttttttgagacggagtttcgttttgttgtttaggttggagtgtagtggcgcgatttcggtttattgtaagtttcgtttttcgggtttacgttatttttttgttttagttttttgagtagttgggattataggcgttcgttattacgttcggttaattttttgtatttttagtagagacggggttttatcgtgttagttaggatggtttcgattttttgatttcgtgatttattcgtttcggttttttaaagtgcggaatattttttaaatgatttaattatatgttttttataagaaatttattttatttataaagatatatataaattgaaattgaagggatggaaaaagttattttaagtaaatggaaattaaaagttgttaggaattgttatatttatgttagattaaatagatattaagttaaaaattgtaaaaatagataaagaaggttattatataatgataaagggattaatttagtaagaggatataataattttaaatatatatgtatttaatattagagtatttagatatataaagtaaatattattatacgtaaagggaaagatagattttaatatgatagtagttggggattttagtattttatttttagtttcggatagattagtaaattttaagtatagtgaatttaaagagattatattaagaaatagttaaatttttgaaagttaaagatagagaagtgatttgttatatataagggatttttgataatatgattagtagattttttatttgatattttggagattagtgtatttaaagtgttaaaaaaaataaaattaaaaaatttaaaattttgtatatggtaaaattgttttttaaaagtataaggaaattaagatgtttttagatagataaaagttaagggagtttattatcgttagaattgttttgcgagaaatgtttaaggaagttttgaaaggtgaaatgaaagggtattagatagaggggatagtgtagatttaggtaggtgtaatggtttttggggaagatttagttagtggggttattgttagtatttagttagttgttattttttttgattttagtgttaagtgatgcgtagggtgatttaggtgtgtgaggggtagttggatgtttagattgagggtattggtgttattagtggttattttattatttaatttatgatttaggtggtgatttagggtgatattattagttatgatgtagttaatatagaggggaaagttgttgagatatattatatttttttatttttgtagtgggagatggggtagggggtattatattagggagtatagttgttgttgttattatttagggtttagaggtattgtttgggtaggtgattttttttggtattggttaattatttgtgatgatgttattataaggagtattgtagggaggaagttagtatttgattgtttttaggatttaattttatttatttggacgtaatattattgtaagttaagaagtatttttatttatttatgaatatataatgtgaaattaaattgaggttataaaatagttgaattttattataagagtgatttatcggtgttatttttaagattaagaaaaattttatttttatgtagagattatttgttttttaattaaaagataattttattttaaagaggaaaaaaaattaattttttttttagtttttttagatgtagaaatgtaattattagtatttttgtgttgggagtaattattagtttttttagatttttaaaatatattttattatgttttattgtatttattttttaattagggatgtgagggatagaataatatttagaatatttgtatagtttgtatataatgtttttattttttgttgtttttatagg

SEQ ID NO: 2128 - DNA, 15548 bp, Artificial Sequence
  chemically treated genomic DNA (Homo sapiens)
tttataaaagtaataagaaataagaatattatatataaattgtatagatattttaaatgttattttattttttatatttttgattaaagaatgaatatagtgaaatataatgaagtatattttaaaaatttaaaaaaattaatgattgtttttagtatagggatgttgataattatatttttgtatttgagagagttgaaaaaagagttgatttttttttttttttgaaatagagttgttttttaattaaaaaataaatggtttttgtataaaaatagaattttttttggttttagaagtgatatcgatgagttatttttatgatgaggtttaattgttttatggttttaatttgattttatattgtatgtttatagatagatagagatgttttttgatttataatggtgttacgtttaaataaataaggttgagttttaggggtaattaagtgttggttttttttttgtagtattttttgtggtgatattattataaataattgattagtgttaggaagagttatttgtttaagtagtgtttttgagttttgggtagtaataatagtagttgtattttttgatgtggtattttttgttttattttttattgtaggggtgggaaagtatagtgtattttagtagtttttttttttgtgttaattgtattataattggtgatattattttggattattatttgggttatgaattgagtggtaggatagttattgatggtattagtgtttttagtttggatatttagttgttttttatatatttggattattttgcgtattatttgatattggggttagggaaggtggtagttgattggatgttggtaatagttttattggttgggttttttttagaagttattgtatttgtttgaatttgtattgttttttttgtttagtgtttttttattttattttttaggatttttttaagtatttttcgtagggtagttttagcggtaatgaatttttttagtttttgtttatttaagaatattttaatttttttatgtttttgaagggtaattttgttatatatagggttttgagttttttggttttgttttttttagtattttgaatatattggtttttaaagtattaggtgagaaatttgttgattatgttattaaagattttttgtgtatgataagttatttttttgtttttggtttttaaaagtttgattgttttttggtgtggtttttttgagtttattgtatttggagtttgttgatttgttcgaagttgagagtggggtgttgaagtttttaattattattatattggagtttatttttttttttacgtatagtaatatttattttatatatttgggtgttttggtgttgggtatatgtatgtttagaattgttatatttttttgttgaattggtttttttattattatataataattttttttgtttgtttttatagtttttgatttaatgtttgtttaatttgatataagtatagtaatttttgatagtttttggtttttatttgtttggaataattttttttatttttttaattttagtttatatgtgtttttataggtgaagtgggttttttatagaaagtatataattgagttatttaaaaaatatttcgtattttgggaggtcgaggcgggtggattacgaggttaggagatcgagattattttggttaatacggtgaaatttcgtttttattaaaaatataaaaaattagtcgggcgtggtagcgggcgtttgtagttttagttatttaggaggttgaggtaggagaatggcgtgaattcgggaggcggagtttgtagtgagtcgagatcgcgttattgtattttagtttgggtaatagagcgagatttcgttttaaaaaaaaaaaaaaagaaaaaaaaaaatatttcgttagtttttttaagtatggaatttaatttatttatatttaagattattattgatatttgagtttttatatttgttattttgttaaagttttttaataatattttttgttttttttttttttttttattatttattattgtggtttgatggtttgataaggtttaattttttttttttttttttttgtgtatttgttttattagagagttttatatttttttatgtttttaagatattgattgttttttttttatttttagatgtaggattttttggagtattttttataaggttggtttagtagtgatgaatttttttagtttttgtttgtttgggaaaaattgtattttttttttatttttgaaggatagttttgttgggtatagtatttttggttgtttgagtatattattttatttttttttgtattgtaaggtttttgtgaagaaatttgttgttagttgaatggggatttttttaaatgtgatttgatgttttttttttgttatttttagaattttttttttgtttttgatttttgataatagataataatgtgttttggagagaatttttttgggttaaatttatttgggaattattgagttttttggatttggatgtttgtatttttttttagatttgggaagtttttagttattattttattaaatagtttgtatatgttttttatttttttttttttttttgtaatttatatagtatgaacgtttgtttttttaatgatgttttataagttttgtagggttttatttgttttttttataattaagtaatattaaatggtatatttttaagtttagagatttttttttttgttttattaagtttgttattgaagttttttattgtattttttaaatgtaatttattgaattttttaattgtaggatttgtttggttgttttttattatgttttaatttttttgttgaattttttgtattgtgaattgtttttttgatttattgaattatttgtatttttttgtattttgttgagtttttttaagattattagtttgaattttttttttagtaatttgttgattttttttttattgggttattattagagagtttttatttttttttggtggtgttatatttttttgtttttttatgtttttgtgtttttgtgttgataggataattattttttttaaattttatagatagtggtttttaaagataaagttttttattagtagttgggttttagtatgttggtttcgaagggtgtggtgattgttttttgatagatgtagtggtatggtaaagtagttgttttatttgtgtttaatgttagtagtaaatgggtgttttaggggtttaggttgtagaagtttgtggtagtggtagtgtaggttgttaatgtttttagtgttgaaggtttttaggatttttttatttttgttttttttataatggggagatttagttaaggtaatattttttggtgttaggtttgataggggttatatatatgtagttgtagtagtttttgattttagatgaaggtatttagagtggttattgggtaaaggttttaggtttaggattttataaatttattgagatatttggttgttgaggtgggtttgttttttgtggtagggtttggacgtagttgtttatagagttaggatttgtgatttggaggtgttttttggtagtttaggtttagagaatgggttgtagttttgattttatttttatgggggttagggtatagtattggtttgattataaagaaggggttttttggaggtttgggtttggggagtagggtatggttttaatttgggaatatgagttaatagggtttagtggtaatataggttttaagggatgaggtattatgaagttatgattttaaattttggaatagttagggataagtagtattttagattgtgaggttaagtgtagtagtagtagtaagtattataaaatggtgaagtatagttgttgtttgggttgggaatggggggtagggaatagtatagtgatgattttattttttagagtgttttagtagtttaggttttagaggattagtttagttttagggaagcggggtattatagttatttggtttgtagaatagggtgttttagtttagttattgttttgtttttttgagatataggatattatattagtttagttttgggatgtatagttgttcggtttggttagggtattgattttgtagggagtgatgtgtttttttagttgaggttcggggagtgtgattgttttgggtggtttaggttttgtttttttggaatgtcgtatattattttagtttaggtataggggtgtatgattgttttgggtggttaaggtagtgtgtttttaggaaataggatattgttttagttttagtttaagggtagtggggtaggagtaggtggagtagttttatttttgtttgattttatagggaagggtgtaatagttgtttaaagtttagtttagggatgttgagttattagtttggcgtggtttagatgaaaggaagttatggttataagttttcgaagtaagatatattttagaagtagttttagttttaaggtggagtggtatagtagttgtgtgggttatagtaggtggagtatagtgttggttttttttttggagggaatatagttgtgtagattttaggtagtttttttagtttggtttagttgttgtttggattttaaggaattttagtggtgagatttgttggtgtttatggtgtagttgggatttttttgtttatttttttgttataggaagaagttttttttcgtttttagatgattttaggaattttggtatttttttttattttttatgtggttattttatttttttttgtttattaggatttttgttatttttttgatgtattttagtatttttagttaagtttgttaaaatgtagttgtttatttgttgttttggttgttttatgaggggatgagtagaaggggtttttagttggttattttgttaatattatttttttagattatattgtgtgtgtgtgtgtttgttttgtttaattgttgtgtaattgttgttaattttgtgttaaggattagtttgagttataaatttaaggttttttttgagtttttttttaggtatgtatagtgattttttaattttttttataaatgtagttgtttttaaatgttttagtttttaatattcggtttttaaaagtgaaagagaaaaatgaagtagagggagatttttagttttttaaatttatggggtaggggagtgagtggggagggggttgtaataatgagtaaggtgtaataataataatcgtttatttttttgcgtttttgtgacgagaaggagtaatgattaattaagagtatagattttagatatttggatggtgtgtttttttttgtttatttgatttttgtaagttgtgtgtagattgttttaataacgtgtatagttgtttgttaagggttgagaggtggaagatgggtagttgttattgtattaagagtttaaatagattaaaattaattgtaatttattatttaagtttgttttttggaagttgtaagtttgtaatagattttagagttttaaaatagttatattagattttgttagtataatttttgtttaggtgaggagatagatttttggtgttttttattttgttatttttttagaatttttaaaagaagtatttgtaaaaattgtttttttgtgttaaatataaatttttaattagattgtaagttttttaagggtagaatttatatcgttttatatttgatttgtatttttttagagtatttagtataatggtgtatttataggaattttttaaatattataaaggattgattttttattttgataagttatatattttttaaaagattagtttttaaatttatttatggtttttataatattttttttatttttgttttggggtaattatgttattttgttgtagatttgttttattataggggtttttgtatagaatttttttaattgagatagttttttgttttttttagttagattttatagtatggggttaaaaggggagatagttgagaaaatattttttttttttttaaatttaatgtggtatttattaggtttttttatttttaattttttgttttatatttggagtttttaaaattttatttttgaatagaatatattatatttttttattttattttagaatttttaatttggtttttatttatttgttagaatttatagattttatgtagttaaagggtagtaattgggtttatagagtttaataaaagatttgatggtatttgtagtatttataatattttgtgtagaatattataattttagtaattttgggttttgagataagaatagaaaatgttatagggtatagttagtgatttttttagggagaaaaaaaattttttattgttaaaagaaggagattttgaagttataggtatgttggtatttggaagattaataaataattgattgataaatggataggggtttggaaataaagttattaaataggattttagtttttatagattttgttttattattattggtaatttttttttaataatttttttataaattgttatgtaatattaatatataatatattaatttattagtatattaaaatgttttatattagtatattaataattaattattttatatgtaaatgtataaatggatatttaatttaatatatatataatgtatttataattttggttgtttttaattttttatatttatttttacgattaaaatggtttattatatttttaagtttgatataaatttaaatatagatatttgtataaatatgtaagtaaatgtttttttatattttggatagtttttttaatttagagttttagaattgtatttattaggttaaaaggtatatttatataatttttgaaagattgagtaatattataattttattgagataatttttaggattagtttgagttgtaaatttaaggttttgagtttttaatatgattttttttggggaaaaagtagatagttacgtaaattaaaaataaaattttaagttttttaattattagaatggatttttttttttgattaagggtattttaaagttaatttgaaaaattattttaggttatgatgcgaagtgaggtttggatatgttttattatattttttttttttttggaatttagaaaaagttaattattattaataataatatagacgttaagttttataagaaatagttataatttattttttttgaagtttgttatttgtaggttttatttgtattaagggtgtttattttttttggttttcgtgggttatattggaagaataattgttttgggttatatataaaatatattaataatatttgatgagttaaaaataaataaataaaaaaatagaaagaaaataaataaaataaaaattttttatgttttaagaaagtttacgaatttgtgttggattgtatttaaagttattatgggttgtacgcggttagtgggttgtgggttggataagtttgatttgtatgataaaattttggtttttataattttttaggatattttagatatttttttttattgattttaattaattattaattagaaaatttttaaatttatttatgatttggaagttttgttttgagttgttttgtttttttagatcgaattaattaaatgtatattttagatgtattgattgatatgtttttttaaaatgtataaaagtaagttggattttgattattttgggtatatgtggttaggattttttgaggttgtgttatgaatgtatttttaattttggtaaaataaattttttaagttgattttagatcggttttagatatttttgggtttatagttaattgaaagatattgataattaggtttttaatatataagtggataattaggaatttaaattgtttggtttttgggaaaatagtttagtttggttaagttttaaggttattagtttagatttaggatttgattttttatttttttacggattggtttatatagttttaggtaagttatttgattttttcgttgtttagtttttttgtttgttaattaagtataatagtatttatattgttttgaaagtttaatgagtttatatttttaaaatatttagattattgtttggtatatagttaagagtttaagaaatgataaatgtttataaattatattttgttatttgttcgttaatttaattttaaattaattttttaatgtatatttttttggaatgttaattttatatgaaaattttgggaaagttttttttatattaaattaaatatgagtttaatgtaagttttttataaataaaagattttaaagaaattattatgggatgtattaggattttagtatttatattttaggaaaagtatattatatatttgtggaaaagtttgagaaataggatattatgtattatataggtatatggttttttaagttaataggtaaagtattttgaatttatttgtaggtttatagattatttggatttttgtattgggatgttagttttgattttttttgggtatttttttttattataaaattattttttattttttattaattttgtaatagttgttatttttttatgtattttaagtaagtatgaagaattttagtaaattagtttggtgacgttttgtttttgtattttttttttattatttttgtaaaagaaaaaaaaaaattttaggattttttttaatttttttacgtaaaagggaagttagttaagtttagaggttaagtgattgtaatatttttttttaaacgaatggttgttattagtattatgttttagttaaatttttaaggaaggataaaaagatttagttatttgcgaagggttattttgatagattatttataagttaattttttgttggttttttataaataaggggatgttaattgtaattttaggtttataatttaagtttagtttttaaaattaaagtttaaaatataaatagatcgggcgtggtggtttatatttgtaattttagtattttgggaggttgaagtggattgtttgaggttaggagttcgagattagtttggttaatatggtaaaattttatttttattagaaatataaaaaatagtcggatgtggtggcgtgtatttgtaattttagttatttaagaggttgaggtaggagaatcgtttgaatttgggaggtagaggttgtagtgagttgagattacgtttttgtatattagtttgggtaataggttgttttaaaaaaaaaaaaaaaaaagtataaataaaaatgtttttttatattttggatagtttttttagttttgggttttagaattgtatttattagtttaaaaagtatgattatttttatgatttttgaaagattgagtaatattataattttattgagataatattttattgagttttgaatatgattatttttttgggaaaaaagtaggtagttaagtaaattaaaaataaaattttaagttttttaataatgtgaatggatttttttttttaataaatggtattttaaagttaatttgaaaaattagtttaggttttttatattgattatgttaattataagtttatttttttaggtgtaaaataaagttaagattttatttatttagaggtatttgtataattgattttttttattttttttttttttttaagatatttatggtattttaaaatatagattttttgggtattaattaaatttttatagaattatttgttttattgtttttttgttttattttttgaaaatttttggaaaattagttatagacgtgtttgtggtttacgtttttttcggatgcgttttgaagtaggtttagtaaatttcgagaattgataattatgttttagttatttcgattgttattttttattggtttgtatgaattttgagggtagagaaattttggttatatttagtttattttttcgtgggattgggcgtttatttattagattgaggaaatgtatttcgggaaatgttttgtttattattaaatagattagcggagtcgcggtattttttcggaaagaattaaattcgatataaagttttggtatcgttattttacgggggtgggattcgggcgttttcgaggattcgtatacggttataggtaagcggtaagagaggatttagaatattatttttttttggttgatttgcgagtttaggtcgggtttaatttttggcgcggtaaagtggatcgaaggttttttagattgggcgtttgtcgtttttaatagtatcgtcgttttcgtagtttagttgcgtgttttatttttcgttttgcgttaagattttttttttcgttttttatttgcggttgcggataatatttatggcgttacggcgacgagtattagggtcgtcgcgtttaggaggacgattattatttgggagtcgtcgtagattttattagttatatgttcgcgtacgcgtagttttttttagtcgttatcgtttcgttttaagttatatcgtttttttgtatacgcgttgttttttttagtttttatcgtttttttacgtacgcgtcgttttttttgatatatatatcgttttttcgcgtacgcgtcgtttttttacgtacgcgtttttttttttagttagtattttttttttaagtttttattgttttattttaattgtagtatttttgtgcgcgcgcgttttagaaatcgtaggttttttgtattttttttttttttatttttttcggtttatggtcggtttggagtattttattatcgtattttaggacgatttttttttataggaggttttgatttttataggatcgcggtatatatttgcgtagatttagcgattttggagttttcgcgttttttttttatgtttgtagtcggagggcgcgggtgggtttttggtcgcggttcggcgtttttcgttttcgttttttttcgttcggggcgtttgttgattttagagttttggatagtggcgttgggagtttttagcggtttgggaattagatgaggttggaaggaggaagtggttgagcgattagatcgttgttgtgtgtagagcgagagcggggtagaggcggtcgagcgttcgtttttcgggcgatttggttgaggggcgagatggttttttggagagaatagttacgggttttgggtcgaggggttttaaatagtagtcgttaggttgttttggtcgtcgggttttattagtaaataattcgagtttatggttcgaatgattatttaattaaattttttagtaatagatttagtgtattgtgaaaatatgcgaaataaaatttaaatgatgagataaaataaggaattaaatatttcgttgttataataattaagtaattaattagtaattatataattaaatgaatgtttgtaaagaataatgtaatggaatatatatgtattttatttatatattttatttttatattttatttatatattttatttttatattttattattatattttatttttatattttatttttatattttatttttatattttatttttatattttatttttatattttatttttatattttatttttatattttatttttatattttatatttattttatttttatattttatatttattttatttttatattttatatttattttatttttatattttatttttatattttattattatattttatttttatattttatttttatattttatttttatattttatttttatattttatttttatattttatttttatattttatttttatattttatttttattttatttttatattttatatttattttatttttatattttatatttattttatttttatattttatttttatattttatttttatatgttatttttatatgttatatatattttatttttatatgttatatatattttatttttatatgttatatatattttatttttatattttatttttatatgttatttttatatgttatttttatatgttatttttatatgttatttttatatgttatttttatatgttatttttatatgttatttttatatgttatatatatatgttatttttatagttatatatatatgttatatatatatgttatatatatatgttatatatatatgttatatatatatgttatatatatatatgttatatatatatgttatatatatatatgttatatatatatgttatatatatatatgttatatatatatgttatatatatatatgttatatatatatgttatatatatatatgttatatatatatgttatatatatatatgttatatatatatatgttatgtatatatgttatatatatatattttatgtatatatgttatatatatatattttatgtatatattttatatatatatattttatgtatatattttatatatatatattttatgtatatattttatatatatatattttatgtatatattttatatatatatattttatgtatatattttatatatatatattttatgtatatatgttatatatatatattatatatatatttcgtatatatatattttatatatatattatatatttatttcgtatatatatattttatatatatattatatatatatttcgtatatatatattttatatatatattatatatatatttcgtatatatatattttatatatatattatatatatatttcgtatatatatatttcgtatatatattatatatatattatatatatatttcgtatatatatatttcgtatatatattatatatatatttcgtatatatatatttcgtatatatattatatatatatttcgtatatatatatttcgtatatatattatatatatattttatatatatattttatatatatattttatatatatattgtatatatgtattttatatatgtatattgtatatatatattttatatatgtatattgtatatatatattttatatatatatattttatatatattttatatatatatattttatatatatattttatatatatatattttagatatatattttatatatatatattttagatatatattttatatatatattttagatatatattttatatatatatattttagatatatattttatatatatatattttagatatatattttatatatatattttagatatatattttatatatatatattttagatatatattttatacgtgaatattttatatatatatattttagacgtgtatattttatatatatatattttatacgtatatattttatgcgtgtatattttatacgtatatattttatatttatgtgttttatatatgtatattttatatgtatattttatacgtatgtgttttatatgtatatatacgtatatattttatacgtatgtgttttatatatatattttatacgtatgtgttttatatgtatatgggatttatacgtatggtcgatatacgtatgttttatatatgtatggtttatatacgtatgttttatatatgtatggtttatatacgtatgttttatatatgtatggtttatatacgtatgttttatatatgtatgttttatatacgtatgttttatatatattggttttatatatatatgttttatatatgtattggttttatatatatatgttgtatatatgtattggttttatatatatatgttgtatatatgtattggttttatatatatatgttgtatatatgtattggttttatatatatatgttgtatatatgtattggttttatatatatatgttgtatatatgtattggttttatatatatatgttgtatatatgtattggttttatatatatatgttgtatatatgtattggttttatatatatatgttgtatatatgtattggttttatatatgtatgttgtatatatgtattggttttatatatgtatgttttatatatgtattggttttatatatgtatgttttatatatgtatttgttttatatatgtatgttttatatatgtatttgttttatatatgtatatatgttttatatatatatatatgtatatattttattgtattgttcgaatcggagttttgttttgttattcgggttggagtgtagtggcgcgatttcggtttattataattttcgtttttcgggtttaagcgatttttttgttttagttttttgagtagttgagattatagttgtgcgttattgcgttcggttagtttttgtatttttagtggagatgggattttcgttgtgttatttaggttggtttggaatttttgatttgaagtgattcgtttatttttgtttttcggagtgttgggattgtaggcgtgagttattacgtttaggggaaatatgtttattttaaaaatattttagaggtataatttatgtattttgaaatttatttagtttgagtgaataatgatttttaggtaatttatttagttgttaggtatcgtttaaaaaattttgaattattattttacgatttatcgatttgggggtttgattttgagtgtgttagtatttcgttttaataatattaaaggtggaaaaatattttatgaagatacgtgaatttaaatggaagaggaaaaatttttggttgtaattataaaataatatttattttaaaagttttttgaacgattttgtatgtttaaattaaaatttttattttttgttgtttaaaagtttttgtaaattagttggaataggatgtatttttatatttagaataatgagtttaaaatgattgaaaagtttaattagatttttaaatatattgataatttttttttttttttttttttttttttttttaagatttttatttttttttattttaatataatttattataaatattgaattgtattttaataaaattggattgtgttttaataaaatttgttatagttgtgatattttgtggtaagtatttcgtgtattttagttttaatttttttgttgtaataatttatttaaggataagatatgaattaattttttttgtggtgtaagttttgtaattttaatttagaatttttttttttttttttattttagttaaaacggtttattagaggttgtatttgtagtttttttatatagtatgtttttttttattttttttggtggggaggggagagggaattttgttttgttgtttaggatgaagtgtagtggtatgatttcggtttttagtaatttttgtttttttagtttaagcgatttttttgttttagttttttaagtagttgggattataggcgtgtgttattgcgtttggcgaatttttgtatttttagtagagacggggttttgttatgttggttaggttggttttgaatttttggttttaagtaatttatttattttagttttttagagtgttgggattataggagtgagttattatat

SEQ ID NO: 2129 - DNA, 16766 bp, Artificial Sequence
  chemically treated genomic DNA (Homo sapiens)
tgttttagttttttgagtagttggtattataggtatttgttattacgtttggttaattttttgtatgtttagtggagatagggttttattatggtagttaggatggttttgattttttgatttcgtgattcgttttttcggttttttaaagtgttgggattataggtgtgagttattatgtttagtttttttttggttttaattgaatattttatatgattttattttttttttatttagtatattaattgtattagttaggattttttagagggatagaattaataggatagatgtatatatgaaagggagtttattgggagaattgatttatatgattataaggtgaagttttacgattagttatttgtaagttgaggagtcggaaagttagtttaagttttaaaagtttaaagtagggaagttaatagtgtagtttttagtttgtggttaaaggtttgagagtttttggtagattattggagtgaagtttaagagtttaaaagtcgaagaatttggaatttgatgtttgagggtaggaaatatttagtatgggagaaagatggaggttagaagatttagttagtttagtttttttttttttttttgtttgtttttattttggttatgttggtagttgattagatggtgtttatttagattgagggtgggtttgttttttttagtttattgatttaaatgttaattttttttgataatatttttatagatatatttaggaataatattttgtattttttaatttaattaagttgaaatttattattaattattatattaattatatttttttttaataaatttttagtgattgttttagagtttgtaatatatattataattaatttaagtttatttttaaataataatatattaatttatgggtagtatataagtattttagaaaagagtatttttaattttttttttttaatttttataatattgttattatatattttatttatttataagttataattaattaatatgttgttgttattattatttggataattatttttaatttgataaagaatatttatagaatttttatagttatttatagaatttaggaaagtattttatttattattatcggtttatataaaagatataatttaggaatagttaagtggaagagatatttaggataaggtatgggagaaaggggtattgagtttttatgtcgtttttaagtgtattaattttttagaattttaatgtgttaattaatttagaaattttttaaattttgttggttgtttaggggttatttatggaggttatattatgtaggtatgattgattattaatttagtttttagttttttttttttttttggaggttggggtggagggggtagggttaaaagttttaggttttattgattattgggtttggtttttttggtgattagtttttatttaaaagttatttaggggtttattaagagtagttttattgttgggcgcggtggtttacgtttgtaattttagtattttgggaggtcgaggcgggtagattatgaggttaggagattgagattattttggttaatatggtgaaatttcgtttttataaaaatataaaaaaaaaaaaaaaaaattagttgggtgtggtggcgggtgtttgtagttttagttatttgggaggttgaggtaggagaatggtgtgaattcgggaggtggagtttgtagtgagtcgagatcgcgtagttgtattttagtttgggaaaaagagcgagattcggttttaaaataaaaataaaaataaaaatagtagtttcgttataacgtttattatttttattatttaggaaattgtaggggatttaggagttttaggtaggaattagattatatatttttttatgaaaaaataaaatttttagtatagcgattattatgattttaaatttttagtttgatttgtaaattttttgttattttcgagttttatttttaagtttgttttgttttttttaattgtgtttggtgttgtttgttttttagtatgttttgtaattcgttgttaaaaattagatataatatattaggttatgggagttgagataaatggttttttaggataaggtgttaggtttatttggttaagagttaggttgtgttaaatgtttgttgtagttgtaggtgttagaggttttagttttatttagtgtttttatttttgttttttttattgtttttgggtttttttagaaatgtttttttaaatggagttgtaatttatcgttattatattatagagttttgttgatgtggtggtaagatattgtggaggtaaaatattttataattttatgattaatttttagagttttttttaatgggtttgagtttttgggttatgatttttcgagaagttttttaatttttgttttttttttttagttatgatagataggaaggttagagggggttgagttgtttaattgtttttttgttaggttagtttaggttttagtaatgtaattgttttgaggataggtttttgttatagaatattttgggtatattttaaaatgtttatttttttttttttatcggttagttaggaatttttttgtggtttttattatgagaatttggtagagttttttggagtaaatttttaataatttggggagtatttttttaagattgagtatttaatagtgtttaatttttaagttagtttatatttagtttttagtaattagttaattataatttaagttttgttatgattttagaggtttttggtttttgtaaattgtgattttttgtatttgtttgttttttagtttttgtagtttgttttgtgatttaatttattgatattgaaataagaagagttgttaatttttaatttgtttagttttttttttgttgtggggagtggagtgatagtttttaagttttttatattttggtatagattgtatttgtttttgttttgttttgttttttgtttgtttgtttgttttgagacggagtttcgttttgtcgtttaggttggagtgcggtagcgtaattttggtttacggtaagttttattttttgggttaacgttattttttcgttttagttttttgagtagttggggttataggcgttcgttattatatttggttaatttttttttttttttttttttttttttggtatttttagtagagacggggttttatcgtgttagttaggattgtatttgttttttaaaaaattttttttttaattatataagtaaggatgtttattgtagaatgtttggaaaggaaataaaataaaaattatttattattatttaatttgtaataagttatagttaaggttttgatatagttttatttttaatatatatgtttatataaaagagtgtatgtagtatatggagtttggtattggattttttttatttttagaggttatttttgtaaattttttaaaattgtggttgaaaatatttttaatgttgaatgttttttataagaaataggattttagataagttttttttagatcgtatggggttggtgggaattttgttaagggttatataagaggtaggatcgtgatattttttttatgattatttttgtgtttagttttaaaggagtattagtaaatgttggttgattttatagattaaaaggtttattttttttatttataaaaagtatgaaatatttttttttttttttttttaggaggttagaaagttgaacgagagattaaatatttagttaaaataatttaggtggttagtgtatttttttttttttttttaaaaagatattaatatttttattttagtagttgtaatgtttagaatatatatatattttatttgaaagttgttttatagtttattttggttttggatttttttttttttttcgttttttttgagatagagtttcgtttttgttttttaggttggagtgtaatggtgtaattttaatttattgtaatttttattttttaggtttaagtaatttttttgttttaggtttttaagtaattgggattataggcgttcgttattacgtttagttaatttttgtatttttagtatagatagggttttattatgttggttaggttgggttttgaagttttgattttagatggtttatttgttttggttttttaaagtgttgagataataggtgtgagttatcgttttcggttttatagtttattttagaagttgataggttataaataataagtagataaattaatgaagaatatttgtttttttgtttatttcgaaatacgttgattagtggggggtcgagggaagggtaggagtatggagaagagattcgcggagaagaggggagaatttataacggataatgttgtagatatttataatatttatttaatggtaggtatttttattttcgttttattagttggagaattatattatgtaggtttatataattaataagtgggggagttaggagagaatttatttattttttagtttatttatttatttagttagttaatatatttttgggtgttttttaaatgttaggtattattttaatttttaaggatattttagtaaataaaatagttttaaattttttttttatggagttttttcggcgaaggcgggattggttaggagttgataatcggtagtagacgattgtaaatgatcggattttttttttatttttttgtttagttttcggttcggttttcgttttcggttttgttttagtttcgttagcggtttaggattcgtttttggtttcggtttcgtttttggtttcgttttcgttttcgcgtcggcggcggcgcggcgttcgcgttttcgtatcgtttttcgtaggtcggggttcggcgcgcgtattcgtattaaagacgttttttttcggcgggtaggaatttcgtcggcgagtcgaatagtttttcgagcgtagttcgcggattattattcggtcgtacgggtcgtttttgtttttcgttcgtcgtttttgttcgagaggtcgttcgcgaggcgtattttgatcgcgagcgtcgggttttagagtcgggcgcggttggggttcgaggttagtatttttcgggagtcgtaaggcgagagttgtaaaggtaacgtagcgtggcggggtcgcgggagcggagcgcgtggttagttgattggagggaaaacgtcgtttttttgtagcggttttcggaatttttttcggttttttttcgtttttttcgatttttttttttttttttgttttttttttgcgttttgagtatgcggttagtgcgttttttttttttttcggggtcgtatttgcgattttaggatttttttcgggttttgttttgcgttttttacgcgtcgtttttgttgggagttcgttttcgttgtattttttcgcgttttattttattttattaaggatgtttaggatatcgggtatttgttattgtaagatgtgagtcgttgttaagtttgagggttatatttttttaggtttatttcgttttgtaaaatcggtttattagttgggtgtttaggttcgggatttttagttcgtttttttgaggttttttgggattagtttttttcgatttgcgttagggttatagattgtagtcggggttggagcggtttatattttttcggattcgttgcgtggaggtaggagggggaaggggcgaggggacgtggtcgcggagatagaagggtgtatttttttagggtcggagaggggagatattgggaagatatttcgcgaatatggagaggcgatcggtatttgtattttaattttgagtaaattaattcgttatacgtagtagcgagttgattttattagttcgtttatttggttagcgatggttatattgattttgagtatttttatttttttttttttaatatttttttttttatttttttgttttgtttagtaagaagttttagaaacgaatatagtatgtttgggcgttgatttagtggtgagaagtgtcggagttggtttagggagaggtggagttttttatgtgtgtttattggtttaggggttaagttttattgtttgttaaggttttttagtattttgtttatttattttttatttatttgtgtaggtttgagggggtgagggggtagtagatattttattaaaatttattttaaggaaaatattcgataaatatttttagtaattagggtatagttgataaggtttgatttgtttgtcgtagaaaatgatttgaatttgtaagttttattgtttataaagttgttttttataattttagataattaaaaatgtatatgatttattttttttatttattattttttttaaagttttttatgtatttattgaaaagttaaagaaaatttgattttggtttatataatttgataatggtgatttgtttaaaagttattttaaaaagtagtatgaaaaggattataattttagaggtattgttatagacgtgaaatatttattaaaatatatattttatggtttatatttgtatatttaaagttatattggatttattttttttgttatttttataaatttttaaattgtttaagagttaatggtatgtattatttttcgttattaattattatgttttgttttgtttggtttggtttggtttggtttggtttttgataaagtttcgttttgtcgcgtaggttggagtgtagtggtattgttttggtttattgtaattttttttttttgggtttaagcgatttttttgttttagttttttgagtagttgagattataggcgtgtgttattacgtttggttaattgtatttttagtagagatgggatttttattatgttatttagtttggtttggaatttttgattttaaatgatttatttgttttggatttttaaagtgttagtattataggtttaattattatgttttattaaagttaaaatttaaattaaaatgttattgtttataagatgtatttttattttatgtaatgaagtaagaaaaaatattgttaattatgttatgttatgttattagaatgaaagtattttgattttagaaatttttaaatgttaaaagaaaatgggtattttataatttgtgaaatattagtgagttagagtagagtttgacggtattggttttgagggttttttttttttttttggaagaatgaaattgggggttatgtaatttagggaagaataaaggaaaaataggtaattggtagaggaggttggttgatttagaggtatggaaaagataaaataaaggagggaaaaagagaggtatgtatgatggggaggagtttagagttattgaaaattttttttggttttaataggaaaacgagttattttataagttagggttttattatttggtacgtggagatatttattagtattgttattggtttttatttgtttgtttttaatttttaagtttaaaaaaaaatttaaaatttaaatgtgttttaattattagaaattatagtgagatttttttgtaataaataggaaagaaggagattgatttagtttttgttaaaaaaaaaaaaaagaggaaattgaattataatatattttgtttttttttttttttataaaggaatagtgggttttttatgttgggtgaaggtgagtgagatgggggaaggtttattgggtattaattttttgggttagagaaattgtttaggttttatagaataagttggaattagataaagttgtggaaaggaagtcgaggttttattttgttatattagtaggaggtattaaagttaaattagtagtagtaaagtgaatagaaatggtaagggggaaaaataggaaaggaaagaataacgtggattgtaagacgttttattaaaaataaagaattatatttggaatagaagaaatttattattattgttttatattgtgtaataatttgataaaaatataaatttaataaaataaatttaaagatgagaaaattgtaaattggagatgaaaagggagattgtagatttaaaggaaaattgaagatcgtaaaaatatagtgatagaataaataagttaggagaaagaatagaagtaatattgttgaaaataaaagtattttaatagaagaaagtttagtaaggaagtttagtaaatttaattgaaaagggataaagattaagaagaaagaagttattatgaaagataaaatataattaagaattgggattattgaagttttagatgtagagaagttaataaatgggatagaaaatttaaataaaaataagtttaaagaaagtttattgagatgaagaaaaaatggtttgtaggttaaaggaatatgttatgttttagaaaatgttatgtgggaatacggaagtattacgatattttaaattatttaaatttaaagaaaaagatttaggaatttaagaagaaaaagtaaaggagggaaaaataaaattaagttcgttttagattttagtgtagtattaaatgttagattatgatggttgtgaggaaatagttttaagggaaagaaattttttcgaggggtatatttttttttcggaagaataaagggaatttagtatttatgaatcgtttttggaaaaataaaaatttgttgagtaataaaatttaggaaatagtaaattaagagataaattaaaataaagaatttaagagtagagaaaggtaaaaagatttggtgagtatttattttatttaaatatagaagtaatatatttatagaaattgtgggtaagatagaatgcgattgttattaatttagataaaaatatatagttaaaaaaaaaagaagttagagaggaagatggaaggaaatatgagaatattaatattttttttttttaaagaatggaatagtaaatatggtataaaattaaaagatgttatgtgaatatataatattgtaatttttaatattttttataagttttatttaaaattttagagggatattataggaaattatatttttttatggataaaaaaatttaaattttaataatttttttgattttattttagtttttttttaagtaatattaaatagaaatattgtgtgtgtgtgtgtgtgtgtgtgtgtgtgtgtgtgtgtgtttatgtatagaaagatttgtgggattatgttcgtttaatattaatgatagtaatagtttttatagaagaaaaaagaaagatgtttgaaaaataagttagaattaaatatgttaagatgttaataattgttgatgttggatggtaggaataaggatgagtgttatttttttatttgtatttttttatatttttttaatttttagaaaaagatatgtaattgtttttgtttaatatttttgaatttattttatttattatttattgtttttttgataatgtgtattagtttatgttaaatagaaggaaagatatagttatattttattaggagattatgaggtagcgagtttttggagggttgtttgtttgtttaggaggagttggaatttaaagaattattttatttaatttatttattttatttgggttttgaaaattggtagggtttgtttggttttagggtgaatagtaggtagagttttttttttagaatggagaaggttatagtgttatagggtgaatttgtgataaaattggggtttagtttgggaagttatatgagttgttggtttcgtataggatggaattaaagagtaagttgatagaattaagtgaaagtaagtttattaagaaagttaaggaatgaaagggtggttattttataggtagagtagtagtatgggttgttttattaagtatatttatggttattttttgattatatgttaaataagtggtggattatttataagttgtttgtaaaaggggtgggagttttggaattgagggttttttatttttttcgatgatatagggtaatttttgtatgttgttatggtatttgtaaattgtggtggtattggtgggagttttttttagtatgttaatatattgtaattagtatatgataagtagtgaggatagttttgttattattttggttttggtaggttttggttagtttttttattgcgttttgttttattagtagggtttttgtgattttttgttttattatataattaagaatgtttaattttttgggaatgtagtttagtaggttttagttttattttatttagttgttatttaagatggagttattttggttttaatatttttgataagagtagggggtgatttgttatttggggtttagtaggataataattttaggaaaaattggaaaggttgatagttttgaatttaatttaaggagtttggtgtattgttaggtaatagtgagttatagattgagtttattatataatttatagggtttatttagagttaaataaaaatgtttgagaaagtattattaaaggtattaaaatataaagtttttttttttatagttttttttttttaatacgtaatgtttttttgtttgttatttaatattattttaagtaaaaaaataggtcgggtatggtggttaacgtttgtaattttagtattttgggaggttaagttaggtggattatgaggttaggagatcgagattattttggttaatattgtgaaatttcgtttttattaaaaatataaaaaattagttgggtgtggtggcgggcgtttgtagttttagttattttggaggtttaggtaggagaatggagtgaattcggaaggcggagtttgtagtgagttaaagtttgcgttattgtattttagtttgggggatagagtgagattttgttttaaaaaataaaataaaataaaaaataaaaataaaaatttgaattattagtatgaatattgtagttttttatattatgtaaaattagatttaaataagagtatttaatttatatatggaattgttaagttatattattagtattttatagtatattttgggaggtttttttgaattagttagaagaagtaaattgaagttagatagaggaagattgtaaagaggaagagagggtttttattaggtatagagttatttaagggagtttttttttaggtttagggatatcgagggagttagagtagatttatataggtttttggggtttttttgttttggtgattttaggatgtatgtatttgtatttgatttttaggtattttttttttgttagttttttttcgatttagtttggggtaggttttgtggaagttaagttttgtattttttttttttaagtatttattattttaatttatagtgtagtggttacgtttaagggtttttacgtttttgttttagatatgttaggtatttgggttaagagtgatttagagatttatttttgttagatttaatttttagttagttattttttgattttagtttatggggcgaggttggagtgttggttttgatttttttagtatttgtattaggagggttttagcggaatgtggttttagttgatgttttatgttaatagtagtagtagtagttgttaggtatagagattgaagttagatagggtttgggatttttttgttgggagtttaaattgtaggagatggggaaggatttaagtgtgagttggggtttttagtataaaatttatattgaaagataaaatggttaagaattttaggatagttataggagaattttaagttaagtgtaggatttttttagttgtagggtttgggggtattgagattagttttgttgataggagttatgttttaggaagattgatttatttgtagttagtaagagttttaaggagttttattaataatttaggtacgatgttaagatgggatattatattttttaagtaagaagaatttggtaattaggtatatggttttaagtgaagtataagttattagaaagtaaggaaggaagttattttttggtttagagggggagaatggggtgtgtgtgtgtgtgtgtgtgtgtgtgtgtgttttttcggttgttgaagagattgagtgtttttgtagatatataataaagatgaagatgtgttatcgttggagataaatggggattagaggttatatgttagaggttaggttaggtgtttaaatataaaggggttgttttggttgggtatggtggtttatatttataatttaagttttttgtggggttgaggtcggaggattatttgagtttaagagtttaagattagtttggataatatagtaaagttttatttttaaaaaaaaaaatataaaaattagttaggtgtagtggtaaatgtttgtagttttagttatttgggaggttgaggtgggagaatcgtttgagtttaggaggtagaggttgtagtgagtcgagattatattattgtattttagtttgggtgatagagtgagattttgttttaaaaaataaagaagttgtttttttataatttggatgtggtggtatttaggggaatgtttataattaggtaacgtttttgttgtggattgattatgggagatgatattatatattaagatattttagtagatgttttttaatgggtatagtattatgggattagttttaggtagtcgtgtttggatattttatgggtggtggagtttgtagtaaggttggaaattttgatttggaattatttggatttttttaagagaatattttaggttggatgtgttattgtggtagtagagaagatttaaaaattatattgtttttagtttgaatttcgttttgtgaagttttaattagggaagaggagttaggttgggggtttaggggaaagtaaagagataaagtagataagttataggtttattttgttttatggtttaggatatataaataaaaagaagaagtagataagttataggtttgtttttttttatggtttaggatatacgatttttttgtatatataatttataatttttttgcgtattattaaatgttttaatttattattaaatatttcggttgatcgaaaaatgtaagttagttttttgttattttggcgttgttagttttttatatagtattttttagtttaaattgtattttataaaatttttagtaagtttttgttttttggtagttaattcgttttttattgatttgtttattgtttttttgtaatgtatttttttattttttttaataaatttgttttttttgatttaaattgttatggtaaattttttttatttttatgttattagttatagatagtcgttataagttatgataagtttgcgattttatggtttttttttattttgatgatatttttttagtgtttgggggatagaagaatgtttataatttataggttttagttatatggatggggatagaatatttgagagagagagaaggaataagatttattggggttttttaaaattttttttgaagaattttttttttattttggagtagggaagattttttgattatgatttaaaatttagaagttaagaaagaaaatatttttaaatttgaaaatataaaatttaaaaatttttgggtgtttttttgggggggttgttttttttaaatagtataagtaatttaaagggtaagtgataaattggggagagaagaaaaagatgtgatttatattatagttttttttttatttaaaaaaaaaaaaaattgtaaattagtaagaaaatagtaatagtttaatagaaaaattgttaaaggtacgaatagttaatgagaaggagatgtaaatcgtttttaaatttatgaaaagatgaaggtgttttattataaagagtaagagaaatataaattaatattaatgtgaaagataattttttatttatgaatttgagaaaaatttaagaatttgatgatatatttttaagaagtaacggtagggaaacgaaaatttttatatattgtaggtggttatgtaaattggtatagtttcgcgggtggttagtgtgatagtttttatttaaattatagatgtatagttttattgttaggttttttttgtttgtttttttagatttatttttttttttttttattgtttagttggtttaggattttgtttggtaaggatataattttaggttttttgttttatggtttttggttgtgtttagtcgatggggagttttaaataagagaaggaagggatatcgtgagtgatatttattttttagttttttgtttgtattgtttttttggtttggttgtgtttagtggttttatgttatagttgtttatataggagtttttttttataaattgtaatgttggtttttttttttttttcggtttagagtgattatagttattaatgttgtgagttataggttttatatttttttttttgtaggtttagaatggtaatagtttttaatgttgtgagttgtaggttttgtatttttttttttggggtttagagtggttatagtttttaatgttgtgagttataggttttatatttttttttttgtaggtttagagtggtgatagtttttaatgttgtgagttatagtttttaatgttgtgagttataggttttatattttttattttgtagatttagaatgttatagtttttaatgttgtgatttgtaggttttgtatttttttttttggggtttagagtggttatagtttttaatgttgtgagttataggttttatatttttttttttgtaggtttagagtggttatagtttttaatgttgtgagttataggttttatatttttttttttgtaggtttagagtggttatagtttttaatgttgtgagttataggttttatatttttttttttgtaggtttagagtggttatagtttttaatgttgtgagttataggttttatatttttttttttgtaggtttagagtggttatagtttttaatgttgtgagttataggttttggagttttttttttgggttttagagtggttataggttttaatgttgtgagttgtagattttatatttttttttttggtttgtttatagtttttttatatatttgtaaatatagttttgtaatttttaatgatgttttgggtaaagatggattttttatatgacgatagttttataagattatattatatttttattgtattttttttgtgtttaaatatgtttagatatataaatgttattgtgttgtaattgtttatagtatttagtatagtattatgttgtatagatttatagtttaggaataatagtttatattatataatttagatgtgtagttggttatgttatttaggtttgtttaagtatattttgatgtttatataataaaatagtttaataatgaattttttagaatatagtattgtttatagttgtaaagatatggaattaatttaagtatttattaataaatgattggataaagaaaatgtggttaggtgtggtgtttatatttgtaattttagtattttgggaggttaaggcgagaatttaggagtttgagattagtttgggtaatatagtgagattttatttttataaaaaaaaggtttttttaattagtcggtgtgtgatgatatatatttgtagttttagttatttagggggataggtgggaggattgtttgagtttgggaggttgaggttgtagtgagttatgattgtattattggtattttaggttaggtaatatagtaagattcgttttaaaaaaaaaaaaaagttatatatatatatatatagtatatttagttataaaaaagaatgaaatcgtgtttttgtagtaatatggatggaattggaggttattattttaagagaaataatttagaaatagttaatattatatgtttttataagtgggagttattaataaaaaatgtgtatatattgatatatatataatgtggaatgatagttattattgattgagaagggtggattgggtgtggggagttaaggaatgagaaattatttaatgggtataatgtatattatttaggtgatggatatattaaaagtttaaattttattattatgtaatatatttatttaataaaattgtatttgtattttttaaatttatttttttaaaaagcgtgtattttaatttgaatgagttgttttttgttagaattttaattgatatgttttttgtttagtaattttatttttggaaatttttttatatttaaattggtatatgtgtaaaatgaaagagatttttttgtagaagagattggaaataatttaaatgtttatagtaggggtattaattatataaataatggtgtgtttatagagtagaattgtatttagttatttaaaaaataaggatagaaagattttttaaatatatttttaagtggaaaaagtagggtggaatagggattatatatgttattttttgtttaaaagatggggaaattaggaatatgtatttgtttttgtttatgtatgaagatattttgaaggatttataaaagaaaaaaaagttttttaaagggagtaagattttttataattttttttttgaatgtttaaaattgttgaatttaacgattgttgtttgtttaaaagttaaatttaaaattttttttagattaggtaggggattgggtttagaagttgagattaggtttatttgaataaatggggtaaatgattaggaattttattattttttataggttttttattattttgtttttgtttttatttttatatttgtagt

SEQ ID NO: 2130 - DNA, 16766 bp, Artificial Sequence
  chemically treated genomic DNA (Homo sapiens)
attgtaaatataaaaatgggagtaaagataagataatgagagatttgtaaggaatagtaaaatttttagttatttattttatttatttaagtgagtttggttttagtttttgggtttaattttttatttagtttgggaggaattttaaatttaatttttgaataggtaatagtcgttgggtttaataattttaagtatttaaaaaaaaaattgtgaaaagttttgttttttttagaaaattttttttttttttgtgaattttttagagtatttttatgtataagtaaaaataaatatatatttttaatttttttattttttagataagagatagtatgtatagtttttgttttattttgttttttttatttaaaaatatgtttggaagatttttttatttttgttttttaaatagttggatatagttttattttatagatatattattatttatataattagtatttttattatagatatttgaattatttttagttttttttgtaaggaaattttttttattttgtatatgtgttagtttaagtgtgggaaaatttttagaagtagaattgttagataaaggatatattagttagggttttggtaagaaatagtttatttaaattaggatatacgttttttaaaaaaataaatttaaggggtataagtgtagttttgttagatagatatattgtatagtggtgaaatttgggtttttagtgtatttattatttgaatagtatatattatatttattaagtaattttttattttttaattttttatatttaatttattttttttagttagtaatgattattattttatattatatatatgttaatgtgtgtatattttttattaatagtttttatttataagaatatgtggtattgattgtttttgagttgttttttttaagataatggtttttagttttatttatgttgttgtaaaaatacgattttatttttttttatggttgaatatattgtgtgtatatatatgtaatttttttttttttttgagacgggttttgttgtgttgtttagtttggagtgttagtggtgtaattatggtttattgtagttttaattttttaggtttaagtaatttttttatttgtttttttaagtagttgagattataggtatgtgttattatatatcggttaattaaaaaaattttttttttgtagagatagggttttattatgttgtttaggttgattttaaatttttggattttcgttttggttttttaaagtgttgggattatagatgtgagtattatatttagttatattttttttatttaattatttgttgatggatatttaggttgattttatatttttgtaattgtgaatagtgttgtgttttgagaaatttattgttaggttattttgttgtatgaatattagagtatatttagataaatttagatagtatagttaattatatatttaggttatatggtatagattattgtttttaggttataaatttgtgtagtatggtattgtgttgaatattgtaagtagttgtaatatagtggtatttgtgtatttgaatatatttagatatagaaaaggtatagtagaaatatggtataattttatggggttatcgttatataaaaggtttatttttgtttaagatattattaggggttgtaggattatatttataaatgtgtgagagggttgtaggtaaattagaagggagagtatagaatttgtagtttataatattgaggtttgtgattattttggggtttagaagggagattttagaatttgtagtttataatattgagggttgtgattattttgggtttgtagaagggagaatatagaatttgtagtttataatattgagggttgtgattattttgggtttgtagaagggagaatatagaatttgtagtttataatattgagggttgtgattattttgggtttgtagaagggagaatatagaatttgtagtttataatattgagggttgtgattattttgggtttgtagaagggagaatatagaatttgtagtttataatattgagggttgtgattattttgggttttaggagggagagtatagaatttgtagattataatattgagggttgtaatattttgggtttgtagaatggagggtatagaatttgtagtttataatattgagagttgtagtttataatattgagggttgttattattttgggtttgtagaaaggagagtatagaatttgtagtttataatattgagggttgtgattattttgggttttaggagggagagtatagaatttgtagtttataatattgagggttgttattattttgggtttgtagaagggagggtatagaatttgtagtttataatattgatggttgtaattattttgggtcggagggggaagagaagttaatattgtaatttgtaaggagaaatttttgtatgagtagttatgatatgagattattggatatagttagattaagaggatagtgtaggtaggaagttgagggataaatattatttacggtgtttttttttttttttatttggggttttttatcggttgaatataattagaagttatagggtaaggggtttggagttgtatttttattagatagggttttgggttaattaaatagtggggagaggggagggtgggtttgaagaagtagatagaagagatttggtaatgaaattatgtatttgtaatttggatagaaattgttatattgattattcgcggggttatattaatttatataattatttgtaatgtgtgagaattttcgtttttttatcgttgttttttagaggtatattattaagtttttggattttttttaaatttataaatgaaaagttgttttttatattaatattaatttgtattttttttattttttgtgatggaatatttttatttttttataggtttaagagcgatttgtattttttttttattaattgttcgtgtttttggtaatttttttgttgagttgttgttatttttttattggtttgtagttttttttttttttaagtagaagggaaattgtgatatgagttatattttttttttttttttttagtttgttatttgttttttgagttgtttgtgttgtttaaaaaaaataatttttttaaaaaaatatttagaagtttttgagttttatgtttttagatttaaaggtatttttttttttagtttttaaattttgagttataattagaaagttttttttattttaaggtgagaaaggagttttttaagaagaattttaaggagttttagtagattttgtttttttttttttttttagatattttgtttttatttatgtgattaagatttatagattgtgggtatttttttgttttttaaatattggggaaatattattaaaataaaaaaagattatgaaatcgtagatttgttatggtttgtggcgattgtttgtggttggtgatataggagtaagaagaatttattatgatagtttaggttaagaaaggtagatttattagagaaagtaggaaaatatattgtaagggagtaatgggtaggttagtaagagacgagttgattgttaggagataaaggtttgttggggattttataaaatgtaatttaagttgaagagtgttatgtggaggattgataacgttaaggtagtagggagttaatttgtatttttcggttagtcgagatgtttgatgataagttgaagtatttgatgatacgtaggaagattgtgagttatgtgtgtaggagggtcgtatgttttgggttataaagaaaggtagatttatagtttatttgttttttttttttgtttgtatgttttggattatgaagtaaggtagatttatggtttatttgttttatttttttgtttttttttagatttttagtttgattttttttttttaattaggattttataagacgaagtttaagttaaaaataatgtaatttttaagttttttttgttgttatagtaatatatttaatttggggtatttttttagagaaatttaagtgattttaagttaaaatttttagttttgttatagattttattatttatgagatatttaagtacgattgtttggaattaattttataatattgtatttattgagaaatatttgttgagatattttgatgtgtgatgttattttttataattaatttatagtagaggcgttgtttagttgtgaatatttttttagatattattatatttagattgtagaagggtaatttttttattttttgagatagggttttattttgttatttaggttggagtgtagtggtgtgatttcggtttattgtaatttttgttttttgggtttaagcgatttttttattttagttttttaagtagttgggattataggtatttgttattatatttggttaatttttgtatttttttttttagagatggggttttgttatgttgtttaggttggttttgaatttttgggtttaagtgatttttcggttttagttttataaagggtttggattatggatgtgagttattatgtttagttagggtaatttttttatatttgaatatttgatttgatttttgatatgtggtttttggtttttatttgtttttaacggtggtatatttttatttttgttatatatttgtaggaatatttagtttttttagtagtcgagaaaatatatatatatatatatatatatatatatattttattttttttttttgggttaggggatggtttttttttttgttttttggtgatttatattttatttggaattatatgtttgattattagattttttttgtttggaaaatataatattttattttggtatcgtgtttaaattgttaatggagttttttaaaatttttgttgattataaatagattagtttttttaaagtatggtttttgttaatagggttagttttagtatttttaggttttgtagttagaaggattttatatttggtttgaggtttttttgtggttattttgaaatttttaattattttattttttaatgtgagttttgtgttaggagttttagtttatatttggatttttttttattttttgtagtttaggtttttagtagaggaattttaggttttgtttggttttaatttttatgtttaataattgttgttgttattgttggtatggggtattaattgggattatatttcgttgaagtttttttggtgtagatgttggagaggttagggttagtattttagtttcgttttatggattggagttagagggtgattggttggaggttgggtttggtagggatgagtttttgggttatttttgatttaggtatttagtatatttgaggtagagacgtaaagatttttggacgtggttattatattgtgggttaggatggtaggtgtttgggaaagggagatgtaaggtttgatttttatagagtttgttttaggttggatcgaggggaagttagtaggagggggatgtttagaagttaggtgtaagtatatgtattttagagttattagggtagaggggttttagggatttgtgtgaatttgttttggttttttcggtatttttgagtttgagggagggtttttttgggtggttttgtgtttggtggagattttttttttttttttgtaatttttttttgtttggttttagtttgttttttttggttagtttaagggaattttttaagatgtgttgtaaagtattaatggtataatttggtaattttatatatgaattaaatgtttttatttaaatttggttttgtataatataaagaattgtaatatttatgttaataatttaagtttttatttttattttttattttattttattttttgagatagagttttattttgttttttaggttggagtgtagtggcgtaaattttggtttattgtaagtttcgtttttcgagtttattttatttttttgtttgagtttttagagtagttgggattataggcgttcgttattatatttagttaattttttgtatttttagtagagacggggttttatagtgttagttaggatggtttcgattttttgattttatgatttatttgatttggttttttaaagtgttgggattataggcgttagttattatgttcggtttatttttttatttagaatgatattaaatagtaaataaaaaaatattacgtgttgagagagagagattgtggaagaaaaggttttatattttagtatttttagtggtatttttttaggtatttttatttggttttgggtgggttttgtgaattatgtagtgagtttagtttgtagtttattgttgtttgataatgtattaagttttttaggttaaatttaaggttattagtttttttagttttttttagagttattgttttgttgagttttaggtgataggttattttttgtttttgttagaggtgttggaattagagtgattttattttgagtagtagttgggtaaaatgaggttgagatttgttgggttgtatttttagggggttaggtatttttagttatgtgataaaataggaggttataaagattttgttgataagataggacgtagtaaagaagttggttaaagtttgttaaaattaagatggtgataaaattgtttttattgtttattatatgttaattataatatattagtatgttaaaggaaatttttattagtgttattatagtttataaatgttatggtaatatgtagaagttattttatattatcgaaaaaagtgaggaatttttagttttagaatttttattttttttgtagataatttatgaataatttattatttgtttagtatatgattaagaaataattataagtatatttagtggagtagtttatgttgttgttttgtttatggagtagttatttttttattttttgatttttttaataaatttgtttttatttaattttgttagtttgttttttaattttattttgtgcgaagttaataatttatgtggttttttaggttgaattttaattttgttataggtttattttgtgatattgtggttttttttattttgaaagaagagttttatttgttatttattttgagattagataaattttgttaatttttaaggtttagataaaatggatggattgagtgaagtgattttttgaattttaattttttttagatagataaataattttttaggaattcgttgttttatagttttttggtaaagtatggttgtgtttttttttttgtttgatatagattgatgtatattgttaaggaggtaatgaataatgaatgaagtggatttagaaatgttagataaaaataattatatatttttttttggaaattagaaaaatatgaaaaagtataaataagaaagtaatatttatttttatttttattatttagtattaataattgttaatattttggtatatttgattttagtttattttttaaatatttttttttttttttttgtaaaaattattattattattaatattaggcgaatataattttatagatttttttatgtataaatatatatatatatatatatatatatatatatatatatatagtgtttttgtttaatgttatttgggaaaagattaaaataaagttaaaggagttgttaaaatttaaatttttttgtttataagaaagtataattttttatgatatttttttaaggttttaaataaaatttatgaaagatattaaaagttgtagtattatatatttatatagtattttttaattttatattatatttattattttattttttgaaagaagagaatattggtatttttatgtttttttttatttttttttttgattttttttttttttggttgtatatttttgtttagattaataataatcgtattttattttatttataatttttatagatgtattatttttatatttaaatagaataaatatttattaagtttttttatttttttttatttttaagttttttattttgatttattttttaatttgttattttttggattttattatttagtaagtttttgtttttttaaaaacggtttatgggtgttgaattttttttgttttttcggaaaaaaaatatgtttttcggaaaagttttttttttttggaattgtttttttataattattatagtttggtatttagtgttgtattgaagtttgaggcgagtttgattttgttttttttttttttattttttttttttagatttttaaatttttttttttgaatttaaatagtttaagatatcgtagtgttttcgtatttttatatgatattttttggaatatggtatgtttttttggtttatagattattttttttttattttaataagttttttttggatttatttttatttgaattttttgttttatttgttgatttttttatatttgggattttagtggttttaatttttgattgtattttgttttttataatagtttttttttttttaatttttgtttttttttagttgaatttattgggtttttttattgggtttttttttattaaaatatttttatttttagtagtattgtttttgtttttttttttgatttatttattttgttattatgtttttacggtttttaatttttttttaggtttgtaatttttttttttatttttagtttataatttttttatttttgagtttgttttattggatttatatttttattaagttgttgtatagtgtaaggtaatggtaatgaattttttttgttttaagtgtaattttttgtttttagtaagacgttttgtaatttacgttgttttttttttttttattttttttttttattatttttgtttattttgttgttattagtttggttttagtattttttattgatatggtagagtgaaatttcgattttttttttataattttatttgattttagtttgttttgtaaagtttgggtaatttttttagtttagaaggttggtgtttagtgaatttttttttattttatttatttttatttagtataaagggtttattgtttttttgtgagaaaagaaaaaagtaaagtatgttgtgatttagtttttttttttttttttttttaataaggattggattagttttttttttttttatttattatagagaaattttattatagtttttggtggttgagatatatttaaattttaaatttttttttaaatttgagaattaaaaataaataaatgaaaattaatgataatgttgatggatatttttacgtattagatgataaaattttggtttgtggggtaattcgtttttttgttagggttagagaaaatttttagtggttttgaatttttttttattatatatattttttttttttttttttttgttttgttttttttatatttttaagttagttaattttttttgttaattatttgttttttttttatttttttttgaattgtatagtttttagttttatttttttaaaggaagaagaaggatttttagggttagtgtcgttaagttttgttttaatttattaatattttataaattataaaatgtttatttttttttaatatttgagaatttttgaaattagaatgtttttattttggtggtatggtatagtatgattgatagtgtttttttttattttattatataaaatgaaagtgtattttataagtaatggtattttagtttgggttttagttttgataaaatatgatgattgagtttgtaatattagtattttgggagtttaaagtaggtggattatttgaggttagaagttttagattaggttgggtaatatagtggaaattttatttttattaaaaatataattagttaggcgtagtagtatacgtttgtaattttagttatttaagaggttgaggtagaagaatcgtttgaatttaggagggggaggttgtagtgagttaagatagtgttattgtattttagtttgcgcgatagagcgagattttgttaaaaattaaattaaattaaattaaattaaataaaataaaatatgatgattgataacggaagatgatatatattattgatttttgaatagtttgaaggtttataaaggtagtagaaaaaatgagtttaatgtggttttgagtgtgtaagtgtgagttatggaatatatattttaataaatgttttacgtttatgatagtatttttagggttatgattttttttatattattttttgaaatgatttttagataaattattattgttaaattatgtgaattaaaattagattttttttaattttttaataaatatatgagaaattttagaggaaataataggtaagaaaaatgagttatgtatatttttgattatttaaaattgtggaaaataattttatgaataatagaatttataagtttaagttattttttgcgataaatagattaagttttattagttatgttttaattgttaggagtgtttatcgaatattttttttagggtagattttgatagagtatttgttatttttttatttttttaagtttgtataggtggatagggggtgggtggataggatattgagaaattttggtaagtagtgggatttagtttttgggttagtgagtatatatgggaaattttatttttttttgagttagtttcggtattttttattattgaattaacgtttaagtatgttatattcgtttttaagattttttgttaaataaaataaggaaataaaaaaaaaaatgttaaaagaaaggaggtgggaatatttagagttaatataattatcgttaattaaataaacgggttgatggagttaattcgttattgcgtgtaacggattgatttgtttagggttgaaatgtaagtgtcgatcgtttttttatattcgcggagtatttttttagtatttttttttttcgattttgggagggtgtatttttttgttttcgcggttacgttttttcgtttttttttttttttgtttttacgtagcggattcggaggggtgtaggtcgttttagtttcggttgtagtttgtgattttgacgtaggtcgaggggggttaattttaggggattttaagggggcgggttggagatttcgaatttgagtatttagttggtgagtcggttttgtaaggcggggtggatttggaggaatgtgatttttaaatttagtaacgatttatattttgtagtggtaaatgttcggtattttgggtatttttggtggggtggggtgggacgcggaggggtgtaacgaaagcggatttttagtaggggcgacgcgtggagggcgtaggatagggttcgggaggggttttggggtcgtaggtgcggtttcgggagagaggaagggcgtattagtcgtatatttaagacgtagagggagggtaggaggaggaggaggagtcggggagagcgagagggaatcggaggggatttcgggaatcgttgtagggaggcggcgttttttttttagttagttggttacgcgtttcgttttcgcgatttcgttacgttgcgttatttttgtagttttcgttttgcggttttcgagagatgttagtttcgggttttagtcgcgttcggttttgggattcgacgttcgcggttaggatgcgtttcgcgggcggtttttcggatagaagcggcgggcgggggataaaagcggttcgtgcggtcgggtggtggttcgcgggttgcgttcggggaattgttcggttcgtcggcgggatttttattcgtcgggaagaagcgtttttagtgcgggtgcgcgcgtcgagtttcggtttacgaggagcgatacggaagcgcgggcgtcgcgtcgtcgtcggcgcgggggcgggggcggagttaggggcggggtcggagttaggggcgggttttgggtcgttggcggggttggagtagggtcggaggcggaggtcgggtcgggggttgggtaggagaatagaaaaaaggttcggttatttataatcgtttgttgtcgattgttagtttttaattaatttcgttttcgtcgagaaagttttataggggaagaatttgggattgttttgtttattgaagtatttttaggggttagaatagtgtttggtatttagaagatatttaaagatgtgttgattgattgaatgaatgaatgaattaaagagtgaatgggtttttttttggtttttttatttgttaattgtataaatttgtatgatataattttttaattagtaaaacgaggataaaaatatttattattgagtaaatgttgtaaatatttataatattattcgttgtagatttttttttttttttcgcgggttttttttttatatttttatttttttttcgattttttattgattaacgtgtttcgggataggtagaaagatagatgttttttattaatttgtttgtttgttatttatagtttgttaatttttaaaatagattatgaggtcgggagcggtggtttatatttgttattttagtattttgggaggttaaggtagatggattatttgaggttaggattttaagatttagtttgattaatatggtgaaattttgtttgtattaaaaatataaaaattagttgggcgtggtggcgggcgtttgtaattttagttatttgggagtttgaggtaggagaattgtttgaatttgggaggtggaggttgtagtgagttgagattgtattattgtattttagtttgggagataagagcgaaattttgttttaagaaaaacgaaaaaaaaaagaaaatttaaaattaaaatagattatgaggtagtttttaagtaaaatgtatgtatattttaaatattatagttattaaaatggaaatgttaatatttttttgaaggagagggaaaagatatattaattatttaaattgttttaattgagtatttaatttttcgtttagttttttggttttttaggaaagggaggaggaggatgttttatattttttgtagatgggaaaaatgagttttttaatttatgaagttaattaatatttgttgatatttttttaaggttaggtataagggtgattataaagaggatgttacggttttgttttttatgtgatttttggtagaatttttattagttttatacgatttgaagggaatttatttaggattttattttttataaaagatatttaatattgaaaatatttttagttatagttttagagaatttgtagaaatagtttttgaaaatgggagaaatttaatattaaattttatgtgttgtatgtatttttttatataaatatatatattaaaaataaaattatgttaaaattttaattatgatttattgtagattggatgatagtaggtgatttttattttgttttttttttaaatattttatagtaaatatttttatttatataattaggaaaaagattttttaaaaaataaatgtagttttggttaatacggtgaaatttcgtttttattaaaaatattaaaaaaaaaaaaaaaaaaaaaaaaaaattagttaggtgtggtggcgggcgtttgtagttttagttatttaggaggttgaggcgagagaatggcgttaatttaggaggtggagtttgtcgtgagttaagattgcgttatcgtattttagtttgggcgatagagcgagatttcgttttaaaataagtaaataaataaaaaataaaataaaataaaagtaaatgtagtttatgttaaggtgtgaagagtttgaaagttgttattttattttttataataagagaaaagttgaataaattgaagattaataattttttttgttttagtattagtgaattgagttatagggtaaattgtaaaaattgaaagatagataaatgtaaagaattatagtttatagggattagaagtttttgaaattatagtaaaatttaaattgtaattgattaattgttggagattgagtgtggattagtttgagaattaaatattgttgggtatttagttttagagggatgttttttaaattgttaaaggtttattttaagaagttttattaagtttttatggtaaagattatagaaaaatttttgattggtcggtgggaggggaaaagtaaatattttgagatatgtttagagtgttttgtaataaaaatttgtttttagggtaattatattattggagtttaaattgatttagtagaagggtaattagataatttagttttttttagtttttttgtttattatgattggaggaaaaaagtaaaagttaagaaatttttcggagggttatagtttagagatttaggtttattaaagaaaattttgggaattaattataagattgtagaatgttttgtttttatagtattttattattatattaataggattttgtagtataataacggtggattataattttatttaagaaggtatttttaggaaaatttaaagataatggaggagataaaaatgaggatattaaataaaattgaagtttttgatatttataattatagtaaatatttaatatagtttaatttttagttagataaatttaatattttattttaaagggttatttattttagtttttatgatttgatatgttatatttagtttttaataacgaattataaggtatgttgaaaggtagataatattaagtataattggaagagataaagtaagtttagaaataagattcggagatggtagagaatttgtaaattagattaggaatttaaaattatgatgatcgttatgttaagggttttgtttttttatagaaaaatatatggtttggtttttgtttagagtttttaaattttttgtaattttttgagtaataggggtgataggcgttataacgaggttattgtttttgtttttgtttttgttttgagatcgagtttcgtttttttttttaggttgaagtgtagttgcgcgatttcggtttattgtaagttttatttttcgggtttatattatttttttgttttagttttttaagtagttgggattataggtattcgttattatatttagttaattttttttttttttttttgtatttttgtagagacggggttttattatgttagttaggatggttttaattttttgattttatgatttgttcgtttcggttttttaaagtgttgggattataggcgtgagttatcgcgtttagtaatgaggttatttttggtgagtttttggatagtttttagatggaggttggttattaaaaagattaagtttaataattaataaagtttggaatttttggttttattttttttattttaatttttaggaaggagagagggattagagattgagttaatgattaattatgtttatatgatgtaatttttataaataatttttgaataattaatagagtttgaagagtttttgggttggttaatatattaaagttttgggaggttggtatatttagagacggtatggaagtttagtgttttttttttttatattttgttttaggtattttttttatttggttgtttttgaattgtattttttatataaatcggtaatagtaagtaaagtgtttttttgagttttgtgagtagttgtagggattttgtagatgttttttattaggttgagaataattgtttaaataataatagtagtaatatattggttgattatagtttatgaataagtgaaatgtataataataatgttataagggttgagagggagaaattggggatatttttttttaagatatttgtgtattatttatgaattagtgtattgttatttgaaaatggatttagattagttataatgtatattgtaaattttagggtagttattaaagatttgttaaaaagaagtataattaatgtgatggttaatagtgagttttaatttgattgaattgaaagatgtaaagtattgtttttgggtgtgtttgtgagggtgttgttaaaggagattaatatttgagttagtggattgggaaaggtagatttatttttaatttgggtgggtattatttaattagttgttagtatggttaggataaaaataggtagaagaagggggaaaggttagattggttaagttttttggtttttattttttttttatgttggatgttttttgtttttaaatattaaattttaagtttttcggtttttagatttttggattttattttagtgatttgttaggggtttttaggtttttggttatagattgaaggttgtattgttggtttttttattttgagtttttgggatttggattggtttttcggttttttaatttgtagatggttgatcgtgggattttattttgtgattatgtgaattaatttttttaataaatttttttttatatatatatttgttttattagttttgtttttttagagaattttgattaatataattaatgtgttaagtgaggggagaatggaattatataaaatatttaattaaaattagagaagggttgggtatggtggtttatatttgtaattttagtattttgggaggtcgagggggcggattacgaggttaggagattaagattattttggttattatggtgaaattttgtttttattaaatatataaaaaattagttaggcgtggtggtaggtgtttgtagtgttagttatttaggaggttgaggta

SEQ ID NO: 2131 - DNA, 6929 bp, Artificial Sequence
  chemically treated genomic DNA (Homo sapiens)
ttttttttttttttggtgatgatgaatagtataataaatatttttatatggatcgtttttttgttttggattatgttagtggaatatatatataaagtggatttattttataaaaagatttaaaaaggattaggtatagtggtttacgtttgtaattttagtattttgggaggttgaggcgggtggattatttgagtttaggagtttgagattagtttgggtaatataaggaaattttgttttagagaaaataaaaataaattagttaggtatgttggtatatgtttgtggttttagttatttaggaggatgtggtgagaggattgtttgagtttaggaggtggaggttgtagtgagttgtgattgcgttattgtattttagtttcggttatagagtgagattttagttttaaaaatatataaatattttaaaaatataaagaagtagttaaaggagaggaagttaagaggagtaagttagaatatagtttatgtggttagtagtttgtttggtttgaaaggtagttgtttttatttattagttataaattttgagtaagttttttaatttttgtattttatttttttatttgtaaagtgggtataagaatagtaagtttggttaggcgcggtggttacgtttataaatttagtatttcgggaggttaaggtaggtagattacgaggtcgggagtttaagattagtttggttaatatggtgaaattttttttttattaaaaatataaaaatttgtcgggtatagtggcgggcgtttgtaattttagttatttaggaggttgaggtagagaattgtttgaatttgggaggtggaggttgtagtgagttaagatcgtattattgtattttagtttgggtaatagagcgagattttcgttttaaaaaaaaaaaaaaaaaaaaatagtaagtatattttatagagtagttgtaagggaaaggtaaattatatataaagtattaagagttatgtttagtatatagtaagtatggtgtaattgttagttgttattattgttgttattattattaattgtattattatttaattttattaagtttattttttatttttttagaggtaaggtttcgttaagggttggaatgtagtggttatttataggtgtagttataatgtattatagtttgaaatttttgagtttaaatagtcgttttgtttaagtttttttagtagttgggattataagcgtgtatttttgtgttttagtgattaagttttattatgtagaaaataaagagtaaatagtatagttgatacggattttttttttttttttttttttttttaagaatttttataattttttagtttggttattttttaatttgttatcgttggaagttatggatatggtggaggttatttatattaatagaaagaagaaagtgtgggattataattatgatgatgaaagtgatagcgatattgaggtagcgtttaggataagtggcggtggttatattatgtatggattgattgttaggtttttgggttaggtttttgttatttttatagaattttagttgatagattcggagttcgaggaggagtttgatttgtttgaggttgatgtggagttttttacgatgttaaaggatagtttttagtagttggaatttttgagtgggttttgtgagaggagaaagagtttattttaggatttttttttcgaagaggattatagttttacggaggggtttgggggtagaattatttttaatgtggatttaaattttgtgtttttgagagtttttgatgacgaggatagtgacgatttagaagtttttttgatgttatcgttttatttggaagagatggttgatttagaggattttgataatgtgtaattaaattatttgttggttagcggggaagggatatagttaattttttttagtttttttttagagggtttgtggttcgaagatgttttatttgattaaagtgatatttttgagttagatgttgattttggggatggttatataatgagatgattttaaaattattgaatgaatttggatagataagtatttatagggttttttgtttttgtattttaatttgttgttttatcgtttgtaagtgttttttaagggaaggaggaggaaattgtggtgttttttttttttaggtgatattatttatgtatatttttagtatggggattatagtattatttagtgtattgtttatatatttaaagtggtgtattttgaaggaagtatatgtgtattttttttttatattaatgtatttaggatgtttttgtattatgtttattagggagtagggttttttatagttttagaggtggtttaggattttatgatattttttttttttcgtttttttttttttttttttttgagatagagtttcgttttgtcgtttaagttggagcgtaatggtgtgattttggtttattgtaatattcgttttttaggtttaagtgatttttttgttttagtttttttcgtaagtagttgggattataggcgtttgttattatgtttagtaaatttttgtatttttagtagagataggattttattatgttggttaggttggttttaaatttttgattttaagtgatttgttttttttagtttcgtaaagtgttgggattataggggtgagtcgttgtgtttggttggttttgtgatatttttgtgaaataaattgggttagggtgggagtagggaaagaaaaggaaaatagtagtaagagttgtaaagtaggtaggaagggaggaggagagttaggtgagtagtggagagaaggggggttttgtataaggaaatagggaagagttatcgaagttttagtcggtgagttttgggtattttatttatgttatattttgttttttgtaattggaattttattttgtttagttttttttagttaaagtggggaagatagattttaggattacgtgtgtgattaatatagaaaggaaatatggcgtcggggagagggataaaatttgaatgttatattttaagttaaaaaaaaaaaaagtaaatataaagatgttttaagatttttaggagaagtatggtatataagttttagggattttatttgataatttttagagtgttttttatgttgatttcgagtcgagtgtgttagttgtgattatagtgtttgtggatttaggtcgggttgggggggtgtgggcgggggaagggaagtttggttcggagtaattgtttttgtcggtaattttagtattttgggatgtttaaataggcgtatcgtttgaggttagtaattcgagattagtttgggtaatatggtaaatttgtttttataaaataaaattagaaaaattaattgggcgtagtggtatgtgtttgttgttttagttatttgggaggttgaggtgggagaatggtttgagtttaggaagcggaggttgtagtgagttaagattatgttattgtattttagtttgggtgatagaattagattttgtttttaaaaagggagttggtggggagaggttttagaatgttatgtagtaattagtttaaggattgggatttagggatttaatttttatagtttttttgtgtgattttaggtatttgatttagtttttttgagttttaggttttttgtttttgaagtaaaaggattggattaggtaatttttaagattttaggaatttaggagaaagatgagaaaatgtataagaatgaatatttaggtggaaatgttgtaattttgagaagtttttaggatgaatgaaaggtataggattttttattttttatttttgttttttttaagagttggttttttaaattttttttttaggtttttttaaagggggaaaattaaaaattatataagttatagtttaaggattttaaatagattatttatatgattgtttataaggatgaggttgtgaggagggaatattttatttaatttaatgaaattttataggaaagaggttttttgtatattgaattaatttatttgtttttttagtgtatttgttatattttgaaagattttgggttgattttttgcgataatttttatggttgtgagtgtgtgtgtgtgtttgtgtattttttaatattttgtataatgattggaggttggtaaaaagtaatataatagtatttttttaatataaatttggtgtggttttgagttgttttttattggagagcgtacgtgtgttatagattggtgtatttgtcggtatttttaggattgtattaattttttttagttttttttggtggtttgtaggggtttagggcgtatttatttttttttgtttgattttacgtggtgttttagcgttagatattaggcgatgtcgtgtattatttaagatattggatagtttcggattttttcgtttaattattaattaagttaaaaagaggaaattaacgtttttttagtagtttttgaaagaaattagttatttgcgtaaagatgatttggttttgtgttgtttatttttggggagaagggtaaagaagatttttaaattggatttgttgttgaagtgtttttaatttatttgtgcggagagcggattttaagagagggcgtgtcggtgtttcggataaaatttggggaatattgaaagttattattattatcgttattttagtatgtagattttagttttgggttggtgttgtagggtatttatttatttgatttgacggcgttttttaaagtttgcgaggatttttttttttttttcgtgtgtatttgttaagtttgtgtttcgcgtttcgcgggtggattcgggttggtgggcggggtttgtagcggggtgggagttcggtcgttcggtttttttttatttcgtttcgtttattttcgttggttttcggaagtcgtcgcggataagttttttcgggcgcgggcgggggtcgtgtgtttggaggaagtcgcggaatttttagcgttcgtttatggcgtggagttttgggagttggttgggtggttgtttgttggtgttaggtgaggggttcgcggggagggggcgcgtttgggaatcgggaggtttcgcgagatgtcgtttttgattttatttttgggcgttttgtaagtgatttaagagttttcggggtttcgggagagaagatgtaaacgttacggtcggttgttgagacgtaattaggttgttgttgtcgtcgattttgtaataggagaaagttttattcgcgttcggattatagatcgtttgggttttaaatttagggggagattttcggcgttttttgattttttgtttttttgtagttttttgttggcgggcgtttaaataaagtagtttttttaaaagatttaagattttatcgtggttgttatttgatttttttggagattattagtttaagtggaggtttttattagttttcgagtgttttgatagttttttttgattttaagtttgtttttttagtgttagttttttttatagatgtgttttttattattcgttgtatttttttttttttcggtttaggttcgagtattttgaaatttggattttgttttttagcgttttagttttatggtttttaaatttaaatttattgaaattttttttgttttttaaattgattgtttaggttttaataatattatggttatttttttttttttttatgaatttttttttggtttttcgggatattttttcggtttttcgttttgttaggttgtttttgtttgggatttttttgttttgttaggtttttatgtagttaattgtgatgtttaaggttttttttttttttttttggtattgtttttttgggggattttagttaaattttggtattaaatacgggttataggtttatgattcgtatatttatattttttttggtattagttgggtgatgggtggtggtttattatagttttttatttttttatttgtatgtaggttttaaattttttttttttttttttttttttcgtttttttttttgtttgtttgtttttttgtttttttgtttttttttgagatagggttttgttttgttgttgtggtttaggttggagtgtagtggtttgattttgttttattgttattttcgtttttcgggtttaagcgattttttttttttagtttttcgagtagttggaattataggtgtgtgttattacgtttggttaatttttgtatttttattggagatggggtttcgttatgttggttaggttggtttcgaatttttgattttaggtgatttattttttttagttttttaaagagttgggattataggcgcgagttattatgtttggttaggtttcgaattttttattaaaaggtttgaaaataatttttgtttttagtttatatttttttttggtgtgatttttgggtttatttatttggttgtttttttgatatttttattttagtttttttttagtatttttaatttaatgtagtttaaatgggattcgtgagttttttagttgagttttaatcggggtattagttgtttaagtttaaaatggatattgattttagtttttatgtattaaatgtattaggaagtttttagtttgtttttacgtttggaaatatatttgaaatttatgtgtttattttatttttttatagttttttgttattagataaatttaaggtttttttgtttgtttttattttatttttgtttttttagaaatttttttttacggttgtttaaagaaaatttagattttttagtatagttaatttgttttttttttttttatttacgtggtttttgaagatatggagttatagaggagaattaagtgttggatgtgggtttttttatgggtatttgttttgaggagaaaagttgtaaatgtttttgttttatttttatagt

SEQ ID NO: 2132 - DNA, 6929 bp, Artificial Sequence
  chemically treated genomic DNA (Homo sapiens)
gttatgaaaataagataaaaatatttataatttttttttttaaaatagatgtttatgaaaaagtttatatttagtatttggtttttttttatggttttatgtttttaaaggttacgtgggtgagggagggagagataggttggttgtgttgaggagtttagattttttttgaatagtcgtgaggagaaatttttggaggggtaggagtaaaatggggatagataaaggagttttggatttgtttggtggtagaaagttatgagggggtagggtgggtatatggattttagatatatttttagacgtaaaaataaattggagattttttgatatatttgatgtataaaagttgaggttaatgtttattttgggtttaagtagttggtgtttcgattggagtttagttggggaatttacgagttttatttgagttgtattaggttggagatgttggagagaggttgaagtaggaatgttagggagatagttagatgaatgagtttagaggttatattaagaagagatgtgggttagagatagaaattatttttaaattttttaatagaaaattcgaaatttggttaggtatggtggttcgcgtttgtaattttagttttttgggaggttgaggaaggtgaattatttgaggttaggagttcgagattagtttggttaatatggcgaaattttatttttaataaaaatataaaaattagttaggcgtagtggtatatatttgtaattttagttattcgggaggttgagggaggaaaatcgtttgaattcgggaggcggaggtggtagtgaggtaagattaagttattgtattttagtttgggttatagtaatagagtaaaattttgttttaaaaaaaaataaaaaaataaaaaaataaataaataaaaaaaaaaacggaagaagaaagaaagaaaagaaaatttgaaatttatatgtaagtagaaaagtagaagattataataaattattatttattatttaattggtattaagagagatataaatgtgcgagttatgggtttatagttcgtgtttaatgttagggtttggttgaaattttttaaaggaatagtgttagggaaggagagaaaaggttttgggtattataattagttatatagaaatttgatagagtaggagggttttaagtagagatagtttgatagggcgggaaatcggaggggtatttcggaaggttagggaagagtttatgagaaaggaaggaggtgattatggtgttattggaatttaggtagttaatttagaggatagaaaaggttttaatggatttaggtttagaagttatggagttggggcgttgggggatagaatttagattttagggtgttcgggtttgaatcggaaggaggggaggtgtagcgggtgatgggaggtatatttgtagggagggttggtattgagggggtagatttggggttagggagggttgttagggtattcggggattggtgggggtttttatttgaattgatagtttttagaagggttagatgatagttacggtgggattttgggttttttggggaagttattttatttagacgttcgttagtagagagttgtaggaggatagggaattaaaagacgtcgggagtttttttttgagtttagggtttagacggtttgtaattcgggcgcggatggggtttttttttgttatagaatcgacggtagtagtagtttagttgcgttttagtagtcggtcgtggcgtttgtattttttttttcgaggtttcgaaggtttttaagttatttgtagggcgtttagggatgggattaggggcggtatttcgcggggtttttcggtttttaagcgcgtttttttttcgcggattttttatttgatattagtaggtagttatttagttagtttttaaggttttacgttatggacggacgttgggggtttcgcggttttttttaagtatacgattttcgttcgcgttcgggagagtttgttcgcggcggttttcgggaattagcggagatgggcggggcggggtggggaggggtcgggcgatcgggtttttatttcgttgtaggtttcgtttattagttcgggtttattcgcgaggcgcggggtataggtttggtagatgtatacgaggaagaggaagggattttcgtaagttttgaaaggcgtcgttaagttaaataaataaatgttttataatattaatttaggattgagatttgtatgttggaatgacggtggtggtggtggtttttagtattttttaggttttgttcggagtatcggtacgtttttttttgaagttcgtttttcgtataggtgagttaaaagtattttagtagtaaatttagtttgagggttttttttatttttttttttagggataaataatataaaattaagttatttttacgtaaataattagttttttttagagattattaagaaagcgttaattttttttttttaatttgattagtggttagacgggaagattcggagttgtttagtgttttgggtaatgtacggtatcgtttgatgtttgacgttagaatattacgtaaagttaagtagagggaagtgaatgcgttttaggtttttgtaggttattaagaagagttagagggagttggtgtaattttagagatgtcggtaggtgtattaatttgtggtatacgtacgttttttaatggaagataatttaagattatattaagtttgtattaaaaaagtattgttgtgttattttttattaatttttaattattatataaaatgttaaaaaatatataaatatatatatatatttatagttatagaggttatcgtaaaagattaatttagaattttttagaatatgatagatgtattgagaaggtagataaattgatttaatatataaaaggttttttttttatggaattttattagattaaataaggtgttttttttttatagttttatttttatgagtaattatataaataatttatttaaagtttttgaattataatttgtataatttttagttttttttttttgaaggggtttaagagaaaggtttgagaaattagtttttgaggggggtaggggtgaggggtaagaggttttgtgttttttatttattttgggagttttttaggattgtagtatttttatttgagtgtttatttttgtatatttttttattttttttttgggtttttaggattttggagattatttagtttaatttttttattttagaaataaaaaatttgaggtttagaaaggttaagttaaatgtttagggttatatagggaaattgtgggagttggatttttgagttttagtttttaaattggttgttatatgatattttagaatttttttttattaattttttttttaaagatagggtttggttttgttatttaggttgaagtgtagtgatatgattttggtttattgtaattttcgttttttgggtttaagttatttttttattttagttttttaagtagttgggataataggtatatgttattacgtttagttaatttttttaattttgttttgtagagatagatttgttatgttgtttaggttggtttcgaattattggttttaagcgatacgtttgtttaggtattttaaagtgttggggttatcggtaggagtaattgtttcgggttagattttttttttttcgtttatatttttttaattcggtttagatttataggtattgtaattatagttgatatattcgattcggaattagtatagagagtattttgaaaattgttaaatagggtttttgaaatttgtatattatattttttttgaagattttgaagtatttttgtgtttgttttttttttttttaatttaaaatatggtatttaggttttattttttttttcgacgttatgttttttttttgtattagttatatacgtgattttaaagtttgttttttttattttaattggggagggttggataaggtggaattttaattgtaggagataggatgtgatatgggtgaggtgtttaaggtttatcgattgaaatttcgatggtttttttttgtttttttgtgtagggttttttttttttttattgtttatttggttttttttttttttttttgtttgttttgtagtttttgttattattttttttttttttttttgtttttattttggtttaatttattttatagaaatattatagggttagttaggtatagcggtttatttttgtaattttagtattttacgaggttgaggagggtagattatttgaggttaggagtttgagattagtttggttaatatggtaaaattttgtttttattaaaaatataaaaatttgttaggtatggtggtaggcgtttgtaattttagttatttgcgagggaggttgaggtaggagaattatttgaatttgggaggcggatgttgtagtgagttaagattatattattgcgttttagtttgggcgatagaacgagattttgttttaaaaaaaaaaaaaaaaaagaacgaaagaagagaaatattatagggttttggattatttttgaaattgtggggaattttgttttttggtagatatgatgtagaaatattttaagtgtattagtgtaaaggaaaggtgtatatgtgttttttttaaagtgtattattttgaatatgtaaataatgtattgaatgatattatggtttttatattgggaatgtgtataggtgatgttatttggaagaaaggaatattatagttttttttttttttttttggagaatatttgtagacgataaggtagtaagttaggatgtagagataaagaattttgtaggtgtttgtttgtttaagtttatttaatagttttggagttattttattatataattatttttaaggttaatatttgatttagaagtgttattttgattagatggagtattttcggattataggttttttgaagaggggttgggaaaggttggttgtgtttttttttcgttggttagtaaatggtttgattgtatattattaggattttttgggttaattattttttttagatgagacgatagtattagaggggtttttaagtcgttattgttttcgttattaagaatttttaaaaatatagagtttaagtttatattgaaggtaattttgtttttagattttttcgtggagttgtagtttttttcgggaaaagggttttggagtggattttttttttttttatagggtttatttaagagttttaattgttgagggttgttttttggtatcgtggggagttttatattaattttaggtaggttaggttttttttcggatttcgggtttattaattgggattttgtagaggtggtagaggtttgatttagaggtttgatagttagtttatgtatggtatagttatcgttatttgttttgggcgttgttttagtatcgttattatttttattattataattataattttatatttttttttttttgttgatgtaaatgatttttattatatttatggtttttaacggtggtaggttaggaaatggttaggttaaaaagttatgaaaatttttaaaaaaaaaaaaaaagagagagagagttcgtattagttgtattgtttgttttttattttttatataataaaatttaattattggggtatagggatgtacgtttgtaattttagttattggggaagtttaggtaggacgattgtttgagtttaggagttttagattgtagtgtattatgattgtatttgtgaatagttattgtattttagtttttagcgagattttgtttttaaaaaaataaaaaataaatttaatgagattgaatgatgatgtagttgatgatgatgatagtaataataatagttaatagttatattatgtttattatatgttgggtatgatttttggtgttttatatataatttattttttttttgtaattgttttatgaggtatgtttattatttttttttttttttttttttgagacgggagtttcgttttgttgtttaggttggagtgtagtagtgcggttttggtttattgtaatttttattttttaggtttaagtaattttttgttttagttttttgagtagttgggattataggcgttcgttattatgttcggtaaatttttgtatttttagtagagaaggggttttattatgttggttaggttggttttgaattttcgatttcgtgatttatttgttttggtttttcgaagtgttgggtttataggcgtggttatcgcgtttggttaggtttattatttttatgtttattttatagatgagaaaatgaggtgtagaagttaagaaatttgtttaaggtttgtgattagtgagtgggagtagttgttttttaaattaggtaggttgttggttatatagattatgttttgatttattttttttaatttttttttttttggttgtttttttatatttttaagatatttatatatttttagagttagggttttattttgtaatcgaggttggagtgtagtggcgtaattatagtttattgtagtttttattttttgggtttaagtaatttttttattatatttttttgagtagttgagattataggtatgtgttagtatgtttggttaatttatttttattttttttaagataaggtttttttatattgtttaggttggttttaaatttttgggtttaaatgatttattcgttttagttttttaaagtgttgagattataggcgtgagttattgtgtttagttttttttaaatttttttataggataaatttattttgtgtatatgttttattgatataatttaaaataaaaagacgatttatataaaaatgtttattgtattatttattattattaaagaaaagaaaag

SEQ ID NO: 2133 - DNA, 10189 bp, Artificial Sequence
  chemically treated genomic DNA (Homo sapiens)
gtagttggagagtttttttgagaaggtaaatattgagttaagttgaaaggattttagggatttggtatttgggataagtggggagggtggtttaggtagtataggtataggtagatttggggggaagtataaggttaataatagatatttgtgtgataaggattatgaggtggtattgatttttttggttttatagatgagaagttagattttatataaattattttgtttgttagagtttaagcgtgtgtgtgtgtgtgtatgttatgttttaagattatttttttttttttgtatttggttgttttattattttataggttgagtaaaacgattatgtatggaatattgtagaagaaaaattatattaaaaaaaaattggtgttatgatttttatttaggtattttgttttaggagttgttcgattgtatgtgttgttaatgagtgatttatattgaggtatttatattgatttatgtgtgtttttgtgaatagttgtaatttgaggttggttattttatttttttaaattttaggttttttattagaaagagttttgaaatggttttttttttgtatattatgtgtttttgtgaattatttttagagaaaggttagttttttagggtgggatttataaataagggtaattgggtagagttaggggtttaggtgattgtttggattttttggaagggttttttattgtgttgttttgggagatagagtggttagtttggaattgattttaagtttaggttatttaatttttgaaggaaattttttttttttatttagagaaaattttatgtttttgggtgattaggtaagtttgtgattattcgttatgtgtgtgtatatatacgtacgtatatatgtatatgtataaatatttaatatgttttagatatattaaatatatgtatttaagatgtattaaatgtatttttttgagaatataaataagtgttttacgtcggcggttttttttttgattgtatgttagagttatttgcggagttttgaggatttaagatgtttagtttgttttttagattattgggtggagttcgggtattattatttttttttaaatttgggtgagagttggtggtttagattttatattagttgttaaaatatattttttaagatattatgcgttaaaaagtattttaaaagtagattgtgtagatgtgttaatggattagatgattatttagatttaaaattatgtatattttatggatgtaatttatttaataatttagtaaataataaagaaataagtagatataaagtgaaaatatgatagttagtgataagtgttatgaatagaaaaattaaatatgggagggtagaggaatattggtgtgtgtgagtatgtgtgtgtgtgtgcgtgtgtgtgtatgtgtatgtttgtatttggaaaagtatgttgtgttagatttgtagtagagtgtttagggaggatttgtatattataagttagtgttagtaaatcgtaggggaaatataggattatttaattaataatagagaagtaattagtaggtatttgaggaaagtaagtttagttattttttatttttatgttaattaagaaaattaattgttggtggatgaaaaaagttaaatataaaaataaaataaaataatattgagttataaaaatgaagaaattatgtaagtatttatttgattattaataggaaaggatattttatatttaaaagtaatgaaaatattttaaagtaaaagaatgatcggtttgattatattaatataaaatttgttatatattagtataataaaagagagaaagtaaataataagttagataaatatttgagaattggataaaagatataaagagatggtttataaatatgaaaataaaatggttgataataagtgattaatatttgttttatttatatttaaagaaatgtaaatttagaaaataatgagatattatttttttattttggttgtttaattatattttaaaagtaaagttgtttagtgtgtttttgggtgtggtcgatagatgttgttttgtgttattgagtgagagaatatgaatattgtaatatttttggaatgtagtttgttagtatgtatttgttaggttttaatgtagtttttaatttaattattgtattgttatcgagtaatatttaggaaataataagaaatgtagataaataataatagttaatatttaagcggtattattatttattagatatttgtaatagtaatttatttaatttttatattagttttaggagatggtattattatttttttttatagataagaaaattgaggtatagaataggtaagttagttgtttatagtcggttagttggttgaaggtagaatggagatttaaatttatttaggttgttatttgagtttattttgtaaaaaaattgagttattttggtttatttgtgaagatggttatgtgattattttataatatatttggtaaatgataatatatttatatgaagtaatattaggtggtaattagaatggttttaataaagagttttgtgatataggaaaaatgtttattatgtaatattaggtggaaatgtaggatatgtaattttttaaatattttttattttttgagaaggagttttgttttgttatttaggttggagtgtagtgatgagatttcggtttattgtaagtttcgtttttcggatttatattatttttttgttttattttttttagtagttgggattataggtgtttgttaacgtgtttggttaattttttgtatttttagtagagacggggttttattatgttagttaggatggttttagttttttgattttatgattcgtttatttcggttttttaaagtgttgggattataggtatgagttattgtgttcggttaaatattttaattatgtgataatatttataaaaagtataagaaaatatgttaaaatattatatatgttgagattattttttttttttagtttttattttgtaaattttttatattgagtgtaaattgttttggaaattagaaaaattttaaaaagaaagaaatttaagagttacggaaaagtaaaaatattgatgttaaatataataattaaaaatttttaaaatttttatatgtgagatatttaatatttatatttttttatgtttattttattaatatttgttagagtatttgttatatttattagaatatttttttttttggaaatgaatttattatttaatataattttaatttgttaaatttatatataaaatttaagtatattaaaaattttatatatatatatttatatttgtagaatggtgtgtaaatattagttaatttttgtatattgagattttaatatgttttatattgaaatttagagttaatttgttagtttgttgagttattttttgataattttgttttttggtagatattgaatattttttttaaagtggtgttttttataaggttatattagttttaattagagtgatataaaggaaataatattttttattttatttaagataaaagaataggtagagttaataataaaatgtgtgtggaggtagtgggggaggttttaaattatagatttagtttaatttgattatgtatagttggtattttttatttatatttgtttttttggtttttatattattgattattattttttggaaattttattaaatatttggtgatttttttataaggatgtatgtgaatggtttggtagtttagttattaagttttattttggatttaggtattgataattttgtttttaggatggaagatgagtagttgttggtgagaggggtattattttgagttgagaagttgttatgtatttaggaagtttttataagttttagatggtttaattatttaataattttagaaataggtttttttattatttttattttggtaatgattaaataggttttaagatttgtttaagttttgtatagtttgttaggatttaaattggagtggtagtttaggtttgtgtgtttttgaaattagattttgttattaggttgtgttttttgtatttaggatggtaaataagggatatggtgttgtttatgtagtatttagattttgaatggtttttattgtgggggattttttttttattgggtttaaagttgtaattagaatttcgaatgttaggttgtagtaggattaaagtttaatgtagattttagttttattgggatatagttaatgtaaaggaggggtttggagtgtaggagattgttattttatttttttatttttttaaagtaaatttatatgggtagttatagatatacgcgaatatatgtatatatatttatgttttagtgatatatgttagtgagtgttggttatgtgttaggtatcgtgttggattttagtgatatagtgaagagtaaaatagatttagtgtttagaattatgaaagaattatgaaatttacgttttgaaggaggaagatggagttttaaaaatttaattttaaatgaagattttattataatttaggaatgttttgatgtgaaaatatatatatatattttgttatatgggtagaattgttatatatagtttagtatgttatagattgtttatttatagaatggtaatatttgtagtagtattattgttttgaattttggttttggaagtaggatttagtagattaggtttgaaattttttagattttgttgtattagagaaataaattattagggattttttttagaagaaaaattttattgttttgaaattttattaattttatatggttgaaagttttgagaattggttattatattaaggattataaaaattttttaggttgtttttttaaaaatttgtgtgttagaagatttttaaatttttataagataggtatatttttgtttgaaagttttggttgaatttgttttattttgttttttagagaagttatttgaagtagaatttaaattatgaattgtagagaattatttttgattttttgggtgtttatatttgtaagtattgtaggtaagtgattatatatatttttaaatatattttatgagtaattgaggaagaatgttaaagtttttttttttatgtggtggttattgaagatgttgaatttatttagaaaagaaaagattttgtagtttgagtttatgtagtgagagtagagtgaaaaatttgtattttgaaataaattatatttgtttgaggtgaaaatttattttatgttatttgaaattgaggaggtggtagttatttttattattgggttttaggaagtttgaaatatatttttttttttttgagagggaggtaaagatttattttattatttaggtaataatgagaaaagtaaacgataaatatattagatagtttaaaaaaattagagtgagatagaatatataaaaaagagattggttagattaaggagtttaagtaggttttatagtagatgttaaatgttaattttaatttattagtagtgattgtttagagttttttttttttatttgagaaggattttgagattttattttttagcgttttatgattgaatagtaaggtattttttaggttttgggggagaaagtgggagtataaatattaatttgttttgatttattatttaggagagggaaatatatgggtttatttttttattttgataattattgttgaagagatagttgaattaagtttttggtatttttaaataatataggtttaattttagggtatatttatttacgtgaatttatttattattgagatttttgtaatggaattttatttagatgataaaagaatgaggtagatttttatttttttatatgtaatgatttgttaaataagtgagtggaaaagtaaggtataggaaaatgtgttatgagttttatgttttgtggatatatattaatagttttattttttattataatgagagtatgttttaggtatagaaatagttatgtagttagttgtgtaaagttgttaagtttttagttgtttgttttgaagagtattttttatgaatgttttattttagggagatatgataatgttttatatgtaggatttattgaatttagttgagtttaaatgataaaatgttatgattgtttaaatttaagatagttttaaatatagattttattttaaagggtattggttgttggtattgttgggtttttatattgtgtttatggaataataggagtgtttattttggtatttggaattttataaattttgaattttatttatttattttattaaggattatttttaataagtattatggtaattaataaagtttttaatggtaaattatgattagatatttaaagtttttagttgtttgaggaggggggtggtgtggatttttaattattaattttttatttttggagagtgtgtaatttatattaagtttttttaaatggtaatatttttagagagtatatgtttatttaaatatagttatatgtgtttatagaagttttttaagataagcgaaaatttgaaaatttagaaataagttaatatttaatagatatttgtttaataaattaaatttttaatatgtatttttttataaaatggataaattgcgaaatggtaatacgattagatattatattataatgagaaaagaatatattattgttatagtatgaatgtatttataataattatgttaaaataatttagatataaaggagtatatattgtatagtttatgtattttattatattaattttaaaataggaaaataaatgaattgttaatgatttattagggttttgtatgttaattgaagttgatatttatatatatatatgtattatattttttatgttgaagtattagtataaaatagagattgtattgtaattagaaaatatgaagttggtgttttttaatttttgtgttttgtggtagattcgatatttatgtttttaaagaatgtgtattagtttatttttatgttgttaataaaggtatatttgagattgggtaatttataaaggaaagagattttattgatttatagttttgtatggttggggaggttttaggaagtttataattatagtggaaggggaagaaaatatatttttttttatatggtggtattaaggagaaggttgagtaaaaaggggaaaagttttttataaaaatattagattttatgagaatttatttattattaggagtatagtatgagggtaattatttttatgattaaattattttttattaggttttttttatgatatatggggtttatgggaattataatttaagatgatttgggttggggtatagttaaattatattattttatttttggttttttttaaattttatgtttttatattttaaaatataattatgtttttttaatagttttttaaagtttttatttattttagtattaattttaaaatttaagtttaaagttttatttgagataaggaaggtttttttttatgagttagtaaatttaagagtaatttagttattttttagatataatgggagtataggtattgagtaaatatattttttttaaatgggagaaattgattaaaataaaggggttattggttttatgtaagttttaaatttaatagggtagttattaaattttaaagttttaaaatagttttttttaattttatgttttatatttaggttacgttgttgtaagaggtaggattttatggttttgggtagttatgtttttgtggttttgtagggtatatttttttttttggttttttttatgggttggtgttgagtttttgggtttttttaagtgtatggtgtaagttgttagtgaatttattattttggggtttggaggatggtggttttttttttttaattttattagttgtattttagtggggattttgtatgggagttttaatattatattttttttttatattattttagtaaagattttatatgagggttttatttttgtagtaaatttttgtttggatatttagtatttttatatattttttgaaatttaggcgtaggtttttaaattttaatttttgatttttgtgtatttgtagttttaatattatgtggaagttgttaaggtttggggtttgtattttttgaagttatagtttgatttggtattttggtttgttttagtaatggttggaggggtaggatgtagggtattaaatttttaggttgtatatagaaagggattttgggtttattttaggaaattattttttttttttaggtttttgggtttgtgatgggagggttttttatgaagatttttgatatattttagaggtatttttttttttgttttggtaattaatatttgagtttttattttttatgtaaatttttgtaattagttttaattttatgttttttatttttacgaatatggattttttttttttattatatttttaagttgtgaattttttaaatttttatgttttgttattttttgaatgatttgttttttagaaatttttttttttagataatcgttttttaagtttaaagttttatagatttttaggataagggtaaaatgtaattaatttttttgttaaatataataagatttatttttgttttagttttttaaaagttttttatttttatttgagattattttagtttggattttattgtttataatattattagtattttggttaaagttatttaataagtttttaggaagttttaaatttttttatatttttttattttttttaaattgttttaattgttttaaattgttttttaaattgttttaatttttgtttgtatgtagttttaaagttatttttatattttgtgtatttttatagtagtattttatttttggtattaatttattttattagtttatttttatattgttaataaaggtatatttgagattaggtaatatataaaggagaaagatttaatggatttagttttgtagggttggggaggttttaggaaatttataaaagggggaaaagttttttataaaattattagattttatgagaatttatttattattatgagaatagtatgagggtgattgtttttatgattaaatttaagatgaggtttggatggggatatagttaaattatattagaatatttttattatattattttttttttatgttgtggttaataattttgagttaaaattagattgttgttttgagaaataaattttgattatagagaaggtattttgtttatgttttaagggaaatgtttcgtttagtttaaatatttttatttttaaaatgtggtaaaagtgtattcgagagttattggagggtagattatgagaaagatttattaatgttgaatttgaagtattataagtgtcgaaagaggggaacgagtatttattttgggtagatgatggttagatatatttttaaagttagagaatttgggttaattgagaaagagggaaagtgatagatatgtaaatttggattgatattatattaatgaatttttgattatttatatggtgatttatagtaataataaatgtatatatattgtaagttatataggtatatttttaattatttttatatttattagggaatgttagataggtagggtgaatgtaaggtgagtgagatttttgatggtgtagaggaagaacgttaaggttgttagattttttgtttttttttttattgagattttttagtagggtatattttgaggtaggtatggtagtatcgtgatttttgtggttttttttatgaagaagttgtaatgtgtaatatttttttttaagaggtgatataattattagttttttagttatggttggttaagttttgatatttttttgttggggagaaattgttagaagttgtgtttttatttatgttttgaaagtgttttattttttttagtgttggaaagattgacgtaaaaataaagaatttataggaaattgatatcgagattttttaggatttttttgttaattttgtttttttatttaatgtattaggagattaaaaaaagttattttgttattttggtttttgtttttatttattttattttattaattttttgaaga

SEQ ID NO: 2134 - DNA, 10189 bp, Artificial Sequence
  chemically treated genomic DNA (Homo sapiens)
tttttaaaagattagtaaagtaaaataaataaaaataaaaattaaaatgataaggtaattttttttggttttttaatgtattaggtgaagaagtaaggttagtaagaaagttttgagaaatttcggtgttaattttttgtgggttttttatttttgcgttaatttttttaatattagaaaggataaggtatttttagaatatagatgaaaatataatttttgatagtttttttttaataggaaggtattagaatttaattaattatagttagaagattgataattgtgttattttttagaagaaaatattatatattataatttttttatagggaaagttatagaagttacggtgttgttatatttattttaaaatatattttgttgaggagttttagtagaaaagaaaataagaaatttagtaattttggcgttttttttttgtattattagaaattttatttattttgtatttattttgtttatttaatattttttggtaagtgtggggatggttaaaagtgtgtttatgtaatttatagtgtgtgtatatttattattattgtaggttattatgtggataattaagaatttattaatataatattaatttaaatttgtatatttgttatttttttttttttttaattgatttagattttttggttttggaaatatatttgattattatttatttaggataggtgttcgtttttttttttcggtatttgtggtattttaagtttagtattaatgggttttttttataatttattttttagtgattttcgggtgtatttttattatattttgagaatgagagtatttaaattgaacgaaatattttttttaggatatggatagaatgttttttttatagttagggtttgttttttaaagtagtagtttggttttaatttaaaattgttaattataatataaagaggaagtgatgtgatagaagtattttgatatggtttggttgtgtttttatttaaattttattttgaatttaattatgggggtagttatttttatgttgtttttatgatagtgagtgagtttttatgagatttgatggttttgtaaggggttttttttttttttgtaagttttttgaggtttttttagttttgtagaattgagtttattaaattttttttttttatatattatttggttttaggtatgtttttattagtagtgtgagaatggattaataaagtaaattggtattagaagtggggtgttattgtaaagatatataaaatgtggaagtgattttggaattgtatataggtagaggttggaatagtttggagggtagtttggaatagttggaatagtttgaagaagataagaaaatatggaaaagtttggaattttttaaagatttgttaaatggttttaattaaaatgttgataatgttatggataataaagtttaggttgaggtggttttagatggagatgaggaatttttggggagttggagtaaaagtgaattttgttatgtttagtaaagagattagttgtattttgtttttgttttagagatttatggaattttgaatttgagagacgattatttggaagaagaaatttttaaagagtaaattatttaagaggtgatagagtataagagtttggaaaatttatagtttgagaatgtggtaggagagaaaaatttatgttcgtgggaatggggggtatggaattaaagttggttgtagaaatttgtataagaaatgaggatttaaatgttaattgttaagataaggggaaaaatgtttttagggtatgttagagatttttatgagagatttttttattataggtttagaggtttaagaggaaaaaatgattttttgggatgggtttagggtttttttttgtgtgtagtttagggatttggtgttttgtattttatttttttagttattgttaaaataggttaagatattaggttaggttgtggttttagagggtgtaagttttaaattttggtagtttttatatggtgttgaggttgtaggtgtataaaagttaagaattgaggtttgggaatttacgtttaggttttagaggatgtatggaaatgttggatgtttaggtaaaagtttgttgtaggggtggaatttttatgtagaatttttgttagggtagtgtggaagggaaatgtggtgttggggtttttatatagagtttttattggagtatagttagtggagttaagagaagaaagttattattttttaggttttaggatgatagatttattgatagtttgtattatgtatttgaaaaagtttagaaatttaatattagtttatgaaagaaattaggaagaaagatgtattttgtaaagttataggagtatagttgtttaaggttatgggattttattttttgtagtagcgtgatttggatatgagatatggagttgaaggagattattttggaattttaaggtttaatgattgttttattaaatttagaatttgtatggggttagtagtttttttgttttagttaattttttttatttggaaggggtgtatttatttaatgtttgtatttttattgtatttaggaagtaattaaattgtttttgaatttattgatttataggaagggattttttttgttttagatgagattttggatttggattttagagttaatgttggaatgagtgaagattttgggggattgttagaagggtatgattgtgttttgaaatgtgagagtatgagatttgggagaggttaggggtggaatgatatgatttggttatattttaatttaaattattttgaattgtagtttttataagttttatgtgttataggagggatttggtggaaggtaatttaattatgggggtgattatttttatgttgtgtttttgatagtgagtgagtttttataagatttgatgtttttataaggggttttttttttttttgtttagttttttttttgatgttattatgtgaagaaggatatgtttttttttttttttattatgattgtaagttttttgaggtttttttagttatatagaattgtgaattaataaagttttttttttttataaattatttagttttaagtatgtttttattagtagtatgagaatggattaatatatattttttgaaaatatggatgtcgaatttattataaaatataagagttaaggagtattaattttatgttttttggttgtaatataatttttattttatattaatattttaatatagaaggtgtgatatatgtgtatatgtgggtgttagttttaattgatatgtaaaattttggtgagttattaatagtttatttatttttttgttttagagttaatataataaaatgtataggttatataatatgtgtttttttatgtttgggttattttgatatgattgttataaatgtatttatgttgtagtagtgatgtgttttttttttattgtaatgtagtatttaatcgtgttattatttcgtaatttatttattttataaaaggatgtatgttggggatttggtttattaaataaatgtttgttggatattggtttatttttaggtttttaggttttcgtttgttttaaaaagtttttataaatatatatgattgtgtttggatggatatgtgttttttggaagtattattatttgaagaaatttaatgtgaattatatattttttagaggtgggaggttgataattgaaagtttatattatttttttttttaggtagttagaagttttggatatttaattatggtttattattagaggttttgttgattattataatgtttgttggaaatggtttttgatgggataaataagtggaatttaaggtttgtggagttttaagtgttaaaataggtatttttattgttttataaatatagtataagaatttagtagtgttaataattaatgttttttggaataaagtttgtgtttgaaattgttttgagtttggataattatagtattttgttatttaaatttaattaggtttagtgaattttatatgtagaatattgttatgtttttttagagtgaaatatttatgaaaagtgttttttagggtaggtagttgggagtttggtaattttgtataattggttgtatggttgtttttgtgtttgaaatatgtttttattataatgaggagtaaggttattagtgtatgtttataggatatggaatttatgatatatttttttgtattttgtttttttatttatttgtttgatagattattatatataaaaaaatgaagatttattttatttttttattatttgggtagggttttattgtagggattttaataataaatggatttacgtaagtaaatatattttgagattggatttgtgttatttgaaagtattaaaagtttaatttagttatttttttagtagtaattattaaagtagggaaatgagtttatgtgttttttttttttagataatagattaaggtaaattaatatttgtgtttttatttttttttttaaagtttaaggaatgttttgttatttaattatggaacgttaaagaatgaagttttagaattttttttaaataaaaaaaaaaaattttaggtaattattgttaataaattaaaattggtatttgatatttattatgaagtttatttgagttttttggtttagttagttttttttttgtatattttgttttattttaatttttttaagttgtttaatatatttgtcgtttattttttttattattatttaaataatgagatgaatttttgttttttttttaggaaggagaaagtgtgttttaaattttttaaaatttaataataaagatggttgttatttttttagttttaaataatatgaaataaatttttattttagataaatgtaatttattttaagatgtaagttttttattttgtttttattatatgaatttagattgtagaatttttttttttttgaataaatttagtatttttagtagttattatataaaaaaaaaaattttgatatttttttttaattatttatgaaatatgtttgagagtatgtataattatttatttgtagtgtttatagatataagtatttaaagggttaagggtaattttttataatttatggtttggattttgttttaaatggtttttttggaaaatagaataaaatagatttagttaaagtttttaaataaaagtgtgtttattttatgaaggtttaaaaattttttggtatatagatttttaaaaaaataatttagaagatttttataatttttaatatagtaattaatttttagaatttttagttatataaaattaataaaattttaaggtaatgaagttttttttttggaagaaatttttaataatttatttttttgatataatagagtttgaagaattttaggtttggtttattaaattttgtttttaaggttaaagtttagaataatagtattgttataaatattattattttatgaataaataatttgtgatatgttgagttatgtatggtagttttgtttatgtaatagagtgtgtgtgtgtgtttttatattaaaatatttttgaattgtaatgagatttttatttagggttgaatttttaaaattttattttttttttttagaacgtaggttttataatttttttataattttaggtattaagtttattttgttttttattgtattattaaaatttagtacgatgtttagtatatggttagtatttattaatatgtgttattgaggtataggtgtgtatgtatgtgttcgcgtgtgtttgtggttgtttatatgagtttattttagggaaatggagagatgaagtgatagttttttatattttagattttttttttatattgattgtgttttagtggaattaagatttgtattgaattttgattttattgtaatttagtattcggagttttgattataattttgagtttagtggaggaaggattttttatagtggagattatttagagtttaaatattgtataaataatattatattttttgtttattattttgagtgtagggagtatagtttgatggtagagtttggttttagaaatatataaatttgggttgttattttagtttgagttttgataagttgtgtaaaatttgagtaagttttagagtttatttggttattattaaaatggagatgataagaaggtttgtttttggaattattgagtgattaaattatttaaggtttatggagattttttgagtgtatggtagttttttagtttagaataatgttttttttattaataattatttattttttattttaaaaatagagttgttaatgtttgaatttaggataaagtttaatggttaagttgttaaattatttatatatatttttatggaaaaattattaaatatttggtggaatttttaagagataataattaataatgtaaaggttaaagaaataagtatgaatggaaagtattaattgtgtataattaaattagattgggtttatggtttgaaattttttttattatttttatatatattttattattaattttgtttatttttttattttggatagaataaaaaatgttattttttttatgttattttgattaagattgatgtaattttataaaaagtattattttaaaaaaaatatttaatatttattaagagataaagttattaggagatggtttagtaaattgataagttaattttgagttttaatatgaaatatattaagattttagtatataaaaattagttggtatttgtatattattttgtaaatgtggatgtgtgtatgtaaaatttttaatgtatttaagttttatgtgtgaatttaatagattaaggttatattaaataatgaatttatttttagaaaaagagatattttgataaatgtaatagatattttagtaagtattaataaaataggtatagaagaatataaatattaaatgttttatatgtaagaattttaagggtttttaattgttatgtttaatattaatatttttgttttttcgtaatttttaagtttttttttttttaaagtttttttgatttttaaagtaatttatatttaatgtaggagatttataaaatgaagattgaaagaagaaaataattttaatatgtataatattttaatatgtttttttgtattttttataaatgttgttatataattaagatgtttggtcgggtatagtggtttatgtttgtaattttagtattttgggaggtcgagatgggcggattatgaggttaggagattgagattattttgattaatatggtgaaatttcgtttttattaaaaatataaaaaattagttaggtacgttggtaggtatttgtagttttagttattaaggaggatgaggtaggagaatggtgtgaattcgggaggcggagtttgtagtgagtcgagattttattattgtattttagtttaggtgatagagtaagatttttttttaaaaaataaaagatgtttaaaagattgtatattttgtatttttatttaatattatataatgagtattttttttgtgttataaaattttttgttaaaattattttaattgttatttaatattattttatgtggatatattattatttattagatgtattatgagataattatatgattatttttataggtaagttaggatggtttagtttttttgtaggatgggtttaggtggtagtttgggtggatttgaatttttattttatttttaattagttaatcgattgtgggtaattgatttgtttgttttgtgttttaatttttttatttatagaaggggataataatattattttttggaattgatgtgaaagttaaatgagttattattgtaagtgtttggtgaatggtaatatcgtttaaatgttagttattattatttgtttatattttttattattttttggatgttattcgatggtagtatagtgattgagttgaagattatattgaaatttgatagatgtatgttgataaattgtattttagaagtgttgtaatatttatatttttttatttaatagtataagatagtatttatcgattatatttagaagtatattgagtagttttatttttaaaatgtaattagatagttaaaatggaaaaatggtattttattgttttttgaatttgtatttttttgggtataaatgaggtaaatattaattatttattattagttattttatttttatgtttatgaattatttttttatgttttttgtttagtttttagatgtttgtttaatttgttgtttatttttttttttttgttatgttaatatatgataaattttatattgatgtagttaaatcgattatttttttgttttgagatgtttttattgtttttaagtgtagaatatttttttttgttggtggttaaatagatgtttatatagtttttttatttttatggtttagtattgttttgttttgtttttatatttaattttttttatttattaataattaatttttttgattgatatgaagatagggagtaattaaatttattttttttaaatatttattaattatttttttattgttaattaaataattttgtattttttttacggtttgttgatattagtttataatgtataggttttttttgagtattttattgtaagtttagtatagtatgtttttttaaatgtaaatatgtatatgtatatatacgtatatatatatatatgtttatatatattaatgtttttttatttttttatgtttagtttttttatttatagtatttattattaattgttatatttttattttatgtttgtttgtttttttgttatttgttgaattattgaatgaattatatttataaaatatatataattttgaatttaggtgattatttgatttattggtatatttgtataatttatttttgaaatgttttttaacgtatgatattttggaaagtatgttttagtaattaatgtgaagtttaggttattagtttttatttaagtttggaaaaaaataatgatgttcgggttttatttagtggtttggaggatagattgggtattttgagtttttagaatttcgtaggtgattttaatatatagttaggaagagagtcgtcgacgtagggtatttatttgtatttttaggaaagtatatttaatatattttaaatgtatatatttggtgtgtttaagatatattaaatatttgtgtatgtatatatgtacgtacgtgtgtgtatatatatataacgaatagttataaatttatttaattatttaaaggtatgaagttttttttaaatgaaaaaaaaaagttttttttaaaaattgggtgatttaggtttaaggttagttttaagttgattattttgttttttaaggtagtatagtaaaaagtttttttagagggtttaaatagttatttgaatttttggttttgtttagttgtttttgtttatgggttttattttgagaaattgatttttttttaaaagtaatttatagaaatatataatgtatagggaaagagttattttaaagttttttttaatgaggaatttgagatttgaggaagtgaaatggttagttttagattatagttatttataaggatatatatgaattaatgtagatgttttaatataaattatttattagtaatatatataatcgagtaatttttgagataaaatgtttggatgaaaattataatattagtttttttttaatataattttttttttatagtgttttatgtatagtcgttttatttagtttgtgagatgataaaataattaaatgtaaagaggagaaaatgattttggggtataatatatatatatatatatacgtttaaattttaataaataaaataatttgtgtggaatttggttttttatttgtaaggttaagaaaattaatgttattttatagtttttgttatataagtgtttgttgttagttttatgtttttttttaaatttgtttatgtttgtgttatttgggttattttttttatttattttagatgttaggtttttagagtttttttaatttggtttagtatttgtttttttaaggaagttttttaattgt

SEQ ID NO: 2135 - DNA, 5768 bp, Artificial Sequence
  chemically treated genomic DNA (Homo sapiens)
tttattttataagtatttatattagttgttttgtgtagataagggaatttgtataggaggtttatttaaatatgtttatagtggaaaattttattttttaaaatatgtgtagtaaggaaaataaattaatatggagtaagttagtttaagtgttcgtatgtttattggaaggacggggtggagttattaggaatttatattttatgttttggtatttaattgtgaagggggtagtcggaaatttgttttttagggtttttgtttgttgagagttttttttttatttaataaattttattttatttattttttgatgtttgagtgtatatttttttttcgttatgagataaaaatttagatttagttgagttaaggagtaaaaattttgtattattggtgtggatatattattaatatgtgttttaaaattatgtgaaatttgtaaaattttgatatgtttttatatatattgttagatataattatgattgttattttaaaatgttgtttgttatagaaataattaaatttttttgttatatgtatttttagttatggttaaagatttagagtattaagttttttgttatttatagatatttgttgttttattttgattttttttaaaaaacggtttataattagttatagtttaaaatttgttttttttttaaggagatttttgaaagtgtattttgataagtatttttgaatataggtttttgattattttagatattatatgattggattgtgtaaaaatatttagaattttaataaattgatgtatttacgaagattgttagtttaattttaagtataagaaaagttaatgatatgggattgaagtgatagaggattgaaatgatttttaagatgttttgtttgaagtattgttgattttttttatattttgtttgttagagttatgaaaaaaattttttttagttatttgtagattatagttattgggtaaaatagatttttgtgagtaaaattgaagtatttgtttttttttttatttgatttttttaaaatttggaaattatatgtgagtatttttattttattggtaatgtagttatttgtataagtttaataagaatttgttttttgtaataggatataattggagatattgattattttattaaggttttgattggaatggtatatttttagatataattagattgttttgaagaattgaaattgattttatagaattaattaaaagttttttgaaaaggatggtatagtaatttatgtatatggtttttttttaaggtttttaattttgtagtaagtaaagaatattattttttgatagttttagggtttttaagatatgttggaattttaagaagagaggaatttatttaatttgtataggtattataggtatattttggtggtaaatttttggtttggttttttaatttcgaggtttttaaaagtgtaatttaaaatgttttgtgaaagttttagtaaagttaatttaaaatagtttataggtttaattatgatttttattgtattttatgtaaataattagattaagtataatattatattttattttataagtaaattgattttagtaagatttatttttggtagaaatgggaaattggagagagtaaaattatgtttttaaggaagattatagtatatttgttattagatcgtagttttgattattaattgtttttgagtttttattatttttttaaaatttggattgaatttttagtgaaataggttttattacgtattttttattgttgtattttttttaagataaataaaagtataaaattttaaaaattagagataatttaataagtaatggaagttatataaattatttgattgggatttatttaggaatgggttttttttgggatgttaagggatgaaggatgtttattttaatttaagtagagtttgattattagtgtttttatgggaagatttttgatttaagtggggagaaaagagagaagaaaaatagtttagagtagtgtgagttatttgaggtatgtaaaatttattaggtttagagagatatgagtacgtgattttagttatgttttttattttttatttttttattgtatttatgtttagggtaattgtttaaagttattttgtttttgattagttattttatttattatttttaggttttcgaatattatgagatagataatatggatagttaattaatagtttgttttattttaatgtaatttttgttaaataatttagaaattgttttttatttttttttaaaaatttatttgtaattgttgttggttagagaatatatttagaataatttgaatttatggttttataatgtgatttttaagttttgtttaaataaagtttttatttatattaattatgatatagtttgtttttaggtcgattagtaaaagattttgtaggtagaagatggatagtatatgttttttggattaaatttatgattatatattataattattttttttttaaaaatatgaatagttggaagttaaaaaagtgttttatttttttttgaattatatttttgagaaaataataggtatgtataatataatttgaaatataaatttattaagtggatttatttttattttatttaggaatttattttaagtgaaatagaatttatttggttaatggtaatatggtaatatatttttttattatttattgttgtttaataaattattttaaaatttattgatttaaatttaatatagtgatttaaatttaataacgtattattttttataatgttgtaatttgggttgggtttagttgagttgttgtttttttttatgttatatttgttgtaggtatttatttataggtttgaagtcgggtgggttagaatagttggggtttggtttagtattttttttttttttgtttttataatttgtttagtttaggtttttttatagtaaggtgattttaggatatttgggtttgttatttggtgtttggtttttaaaagaggaatcggaagttgaagattttttaaaaattggtttgtaattggtaatagtgttatttttattgtgttttttttattaaaagtgaattataaagttaggttagatttaaggatagagaaaatatattttattttttgatgtgagaaataaaatgtatatggaagtaaatgggaaaaggtgaggagttggtggaagaattgatggtagttatttttagagattagttttataatgtttatagtaagattttttattttttgtaagttttgtttaaattttattaaagtgattaaatttattttaggaggtaattaaatagttgaaatagtttgtatattagtttttgtataaattttacgttaaattgtaatttttagtgttggaggtggggcgtggtgggaggtgatttgattatggggttaggttttttatgatggtttggtattatttttttggtgttgtttatacgatagcgagtgagatttggtagtttaaaagtgtgttgtatttattcgttttttatatttgtttttattatgtgatgtgattgttttttttttgttttttgttatgattggaagttttttaaggtttttttaggaaaagatgtcgttttgttttttgtgtggtttgtagaattatgagttaattaaattattttttttagaaattatttggtttcggatatttttttatagtaatgtaagtatggtttatataataattttagatttagttttgaggtttgtattaagatttttgaaattttataaggatagtttttatattttaatttatttgaatatagttttatttaatggttattgaatatttattaaaaataatattttattattagttttttttatttatttaattttatttttttaaaatttttcgggttttttgtttttgtttttattattgggtttgttgttatatgatattgtaaatttgaagtattatatgtttggagtgtttgttttattgttttttgttattattgttggaataggtttggaataaatttttatatttttttggaattttaggtagatttatgattagtggtggatatatttttggggtttttttttgtttgtagttattaattttttttgtatttttttatttttattttaggtaaatatttattttgtttttatattaaagtaaatttagtttttatttgtattttatgttattttttatatatgtgtagaagtagtttggagttttgatgtgtttagttgtgttagttttatttttattagaatattagatttttgacggaggatgttatttagattttattaagatggtttttagataaaatttattataattattgtggttttagagtttttgaagtattaaatggttttagttgttttattaaaggaataatggagtttttaattatatgttatattttgagattattttttaataggaatataaaaatttaagtaattttagattttaaatgtatttttttttatgtattaataaattattgttttataaaattggtgttggagatataattttttttttttaaaattagaaagttaattataaaataggttttagtgtttattttaaaggttatatttttagagattagttttataagaagaaaattaaaatttatagttgagaaattgagttgaaagttaatattttttataggaaatttttgtaaaggaaattagtttatttatttttttaattaaatttaattataaattttattttattaaggaggttggttagagaagagtttgagatgttttttttttagagtattttttattgaaagaggtagtttatttgatttttttttgtatgattatttattttataatgtttatggttatttataaaataaggttttttttttttttttagttataattttttatttttgagttggtgtaacgtggttattgtgttttttttaggtatttttttggataggaagaaatatagtagaattttttgaaaatggatatttttatatattttcgtttagatataaaagttggtagttattgaaataaggatttgaagttttttttttttttttttatgttttaagagtaggaaataaaggtaagagagtagtatttttttttttttattagattttttaattagaaaatataagttgggagaatagtttaaataatttaaaaaatgagttgttaatataattattttttaagaaatattttagaataataaaatgggttatttattaataaaatttatatttttatatatacggagtttttatttaaaaaaattgatggttataaaataaattcgtttaaagtgttttgagtattttataggaagggttaagagtagagagatttaagatatttgttaaatttgaatgtttatttaaatttaattgtaatatttttgatggtaggtattatagttttattttttgttatttttagataatggggtttaaagttattatggagtatttgagaattataatgatattagttaaattaaatattgttattattatacgagattaaatttttgtttgtaggtgttttttgtgtaaagtagtttaagtttgtttttgatggtgatatttttttttttgggttttagatttttgttgatattgttttttttagtatttttttttttttttttcgttttttattaaaaagttttgtgggtaaagtttagtttattatttttgttaga

SEQ ID NO: 2136 - DNA, 5768 bp, Artificial Sequence
  chemically treated genomic DNA (Homo sapiens)
tttggtagaaataatgaattaaattttatttataaaattttttggtgagaaacgggggagagagaggaaagtgttggagaaagtagtgttaatagggatttgagatttagggagagaaatgttattattaaaggtagatttaaattattttatatagagaatatttgtagatagagatttggtttcgtgtaatagtgatagtatttaatttaattaatattattatgatttttagatgttttatggtggttttagattttattgtttagggataatagaaaatgaagttgtagtatttgttattaaagatgttatagttaagtttaaatgggtatttaaatttggtaaatattttgaatttttttgtttttagttttttttgtaaaatgtttaaagtattttaaacgggtttattttataattattagtttttttaagtgaagatttcgtatatatggagatgtaaattttgttagtaaataatttattttgttattttaaaatattttttgaaaagtaattgtattagtaatttattttttaaattatttaagttatttttttaatttatgttttttggttaggaaatttagtgaaaaaaaagaagtattgtttttttatttttattttttgtttttaagatataaaaaaaagaggaaggaattttaagtttttattttagtaattgttagtttttgtatttgaacgaaaatatgtgaaaatatttatttttaaagggttttattatatttttttttatttagagagatatttggagaagatataatagttacgttatattagtttaaaaataaaggattataattggaggaaaaaggaaaattttattttgtaaatgattatggatattgtgaaatggatggttatatagaggaaaattaaataaattattttttttagtaggaagtgttttgaagaagaagtattttaaatttttttttgattaatttttttgatgagataaagtttgtggttgggtttagttgaaagagtgagtaagttggttttttttataggaattttttgtaaagaatattaatttttaatttaattttttaattgtgggttttggttttttttttgtaaaattaatttttaaaagtgtgatttttgagataaatattaaagtttattttgtgattaattttttaattttgaaaaagaaaaattatgtttttaatattaattttataaagtaataatttattaatatataaaggaaaatatatttaaagtttaaagttatttgagtttttatgtttttattgagagatagttttagaatataatatataattgaaaattttattgtttttttgatagagtaattgaaattatttaatattttaaaaattttgagattataatagttgtaatgagttttgtttagaaattattttggtgaagtttagataatatttttcgttaagagtttagtattttaataaaggtaaagttggtatagttgagtatattaaagttttaggttgtttttatatatatgtagagaataatatgaaatataaatgaaaattaaatttattttggtatgaaagtaaaataagtgtttatttgaggtgagggtaggaggatataagaagaattagtaattgtagataggaaggagttttaaaaatgtatttattattggttatgagtttatttaggattttaagaggatgtgagggtttgttttaagtttattttaatagtggtaataaggagtagtgaaatagatattttaggtatgtgatgttttaggtttataatgttatgtggtaataggtttagtagtaagaataagggtaggagattcgggaagttttggagaaatgaggttgaatgaatgaaaaaggttaataataaggtgttgtttttggtaagtgtttaataattattgaatggaattatatttaagtgaattggggtgtggaagttgtttttgtgaagttttagagattttgatgtagattttaaaattgaatttaaagttattgtataagttatgtttgtattgttataaagaaatattcgagattaggtaatttttaagaaaagtggtttaattggtttatggttttgtaggttatatagaaagtagagcggtatttttttttggggaagttttaggaagtttttaattatggtagaaggtaaaaggggagtagttatattatatggtgaaagtaggtgtgagaaacgggtggatgtaatatatttttaaattattagattttattcgttatcgtgtggataatattaaagggatggtgttaaattattatgagaaatttgattttatggttagattattttttattacgttttatttttaatattggaaattataatttaacgtgagatttgtgtaggaattaatatataaattattttagttatttagttgttttttaaagtgaatttgattattttaatagagtttgaatagggtttataggagatggaaagttttgttgtagatattgtggagttagtttttaaaaatggttgttattaatttttttattaattttttatttttttttatttatttttatgtgtattttgttttttatattaagagataaaatgtgttttttttgtttttgaatttagtttggttttatggtttatttttgatgaaaagaatatagtggaagtgatattgttgttagttgtagattagtttttaaaagatttttagttttcgattttttttttgggagttagatattaggtaataagtttaaatattttgagattattttattgtaaagaagtttaagttaggtagattgtgagaataggagagaaagagatgttaggttaggttttagttgttttaatttattcggttttaagtttgtgagtgaatatttatagtagatgtgatatggagaagaataatagtttagttgagtttaatttagattgtagtattgtgaaaaataatacgttgttaagtttaagttattatgttaggtttaagttaataaattttggggtagtttgttagatagtaatagatgatggaaaaatatattattatgttattattggttaaatgagttttattttatttgagataaatttttggatgaaatggaaatgagtttatttggtgaatttatgttttaaattatgttgtgtatatttattatttttttagaaatatggtttaaggagaaataaaatatttttttgatttttaattatttatatttttgagagagaaataattatagtgtatagttatgaatttaatttaagaaatatatattatttattttttatttgtaagattttttgttggtcgatttaaaaataagttgtgttataattaatataagtaaagattttatttgggtagagtttgaggattatattgtgggattatagatttaagttgttttgaatatattttttgattagtagtagttataagtagatttttaaaggaaaataagaggtagtttttaagttgtttagtaagaattatattaaaataagataagttattgattggttatttatgttgtttgttttatgatgttcgagaatttgaagataatgaatgaggtagttagttagaaataaaatgattttaaataattgttttaggtatgagtatagtgggggggtgagaggtggggagtatgattgaagttacgtatttatatttttttgggtttaataaattttgtatattttagatagtttatattattttgagttatttttttttttttttttttttttatttagattaaaaatttttttatggaagtattgatgattaaattttgtttaggttagaataggtattttttattttttggtattttaaggaaggtttatttttagatagattttagttaagtgatttatataatttttattgtttgttgaattatttttagtttttgaagttttatgtttttgtttgttttggaagaagtatagtaatgagagatacgtggtgaaatttattttattggggatttaatttaaattttaggaaaataataaaaatttaaaaataattaatggttagggttgcgatttaataataggtatgttataattttttttggaaatataattttattttttttagttttttatttttattaaagataaattttattaggattaatttatttgtaaaataagatatagtattatatttggtttgattatttgtataaagtgtaataagaattatgattagatttataggttgttttaagttggttttgttggaatttttatagggtattttggattatatttttaaaagtttcgaggttaggaagttaagttaagaatttgttattaggatgtatttgtgatatttgtataaattgggtaaatttttttttttttgaggttttaatatgttttgaggattttagagttgttagaaaatggtattttttatttattgtaaaattagaaattttaaaaaggaattatgtatataagttattatgttattttttttaagaggtttttgattggttttataaagttaattttaattttttaaagtagtttggttatatttgaaaatatgttattttagttaaagttttggtaaaataattagtgtttttaattgtgttttgttatagaaaatagatttttattaaatttatgtaaataattatattgttaataaaataaaaatgtttatatatagtttttaaattttggagaaattaggtggagagaaaggtaaatgttttaattttatttataaagatttattttatttaatggttataatttataaatagttgaaaagaattttttttatgattttggtaaataaaatataaaaagaattagtaatgttttaaataaaatattttaaaaattattttagttttttattattttagttttatgttattaattttttttgtgtttgaggttgggttagtaattttcgtgaatgtattagtttattagagttttgagtgtttttatatagtttaattatataatatttaaagtaattagaaatttgtatttaagagtatttgttaaggtatatttttaagaatttttttggagaaaaagtaaattttggattatagttgattataaatcgttttttgagaagaattaaagtaagataataaatgtttgtggatgataaaggatttagtattttaagtttttagttatggttaaagatgtatgtgataaggaaatttggttatttttgtggtagataatattttaaaataataattataattatatttgataatgtatataaagatatattagaattttataaattttatatgattttggagtatatattaataatatatttatattaatgatgtaggatttttgttttttagtttagttaggtttaggtttttgttttataacgaggaagaaatatgtatttagatattaaagagtgagtggagtagaatttattaagtgaaaggaaggtttttagtagatagggattttgaaaagtaggttttcggttgttttttttatagttgaatattagggtataaggtgtgaatttttggtagttttatttcgtttttttaatgaatatgcgggtatttagattgatttgttttatattgatttattttttttattgtatatgttttaagggatgggattttttattgtaggtatgtttaggtaagttttttgtgtaagtttttttatttgtataaaataattgatgtaagtgtttgtggggtggg

SEQ ID NO: 2137 - DNA, 5884 bp, Artificial Sequence
  chemically treated genomic DNA (Homo sapiens)
tttaaatattagtatagtagttttttaaaatttgtagttgttagattagttgagtttgtattatttgattttagatttataggaggttgttgatatttttaaagttgtgtttaattagttgagagattaatttatttatagggtgaagttgatgaagtttgttttttttagaatttttgatttggaagtgattttaagtgttatttggtttttgttttcgggtttgggaaggttataatgatattattttatagtgtttattggtttttttgttaatttatatattttgaggatgagattttttaggtttttttagtgaaacggtattgtatgttttatagtttgtgtggggatttatttttgttttggtttatgtagttaatttttttttggttaatattatattttttttttatagttatgttacgttatttattttgtttagttagggatagattgtagttttttatttgtttttaaggttgtagatagtagttatttgttttaatagtttttgtcgttagatgttatttcgtagttttgttttttatattgtatttgattgtttttgaatttttgttttttttaaaattggatttatgtttttttttaaatttaaaaatataggggaaatatttgtgtttttaagcgtatttttagatttttaaaaagtgttaattaagtggttaatattatgttagatattgagaaaattataaggtaagaaaaaatagaaatttagttagagaagaagagtgtgaagagaaagttgtttaggaaataattttatatgatagagggttttaaatttatgattgaattatttggattttattattaggagtaggtatatgggagatattggaggtaataggttggaagaattttcgatataaagaaatatattgatagggtattattgtatagtagattgggaggaggtaaaaggttatatagggaggttgttaggaaggtggtagagtaatttttttgggagttaattatatttaagatattttataaaataaattaggagaaatttttttttattacgaaagtaataatggtttgagagaatgtggaaatttttaaaatatataaggaagaaaaatgttatttataattttataatttaaagataattattgatattttataatatttttatggatataattgagattatataatatatggagtttaatattttttttaaaatttagtataaatatttgtttatattattattatacgaaatataatttataagtagttattaagtttattaaatggatggtttataatttgatagttttgttgtttttagtggatatttagattatttttagttttagttattagtagttaaagtgtaatagttatttttttttaaatatttttatttttttaattatttgtttagtatatatttagagggtaagatttttttttaggtttttgatgttttatagagatatttgttttttttatataagtagtgtgtggtattgagaatatttattattaaattattgttaatttgatagataaaaaaaggttattttttgttagttaattattaatatggttgaatgttttatttaataattataattggaggcgggtggattatttgaagttaggagtttgagattagtttggttaatatggtgaaatgaaattttatttttattaaaaatatataaaaagtaaaaaataaaaattatttgggcgtggtggtgtacgtttgtaattttagttattaaggaggttgaggtagttgaggttattggtttcgtttgtgttattttattttggaatttataaattgtttttttttttgtgattttgtattagttgttttttattttggggaaagtttttttcgtagatttttatatgttggattttttgttttgataagggtttttgttgtattatagttttttttgaagggaggatttttttaatattttttttattattttattataattgtttttagggtttttattagtttgaaattattttttaaaatttttttatttatttgatattagaatgattgtaaattttaagagggtttgttttttgtatagttgtatttttggtatttagaatattatttggaatatagtgggaattgtataaatatttgatgagggattgagcgaattaatgaatggagttcgagggagtgagtgattaagtttaggattgtaggaaattaagtgttttaaggatttttttttagtttttttggttgttttttttatttttagaagtttattttattttaataatagtagtttgttatagaaatgttgttatatatttttaagttttatagaggggaaatatgagaatttaagggttttaaaggtataaagattttggtggagttttaaatatttattttagtttaatattgggttttggaaagtttaattgttgcgtgtgaatatatttttgttttatttttattgggaaatattatttgtgggatatggttaatgggaaataattagatatttagttagaataaataaaaggtagtatgtattatgtaaaatataaatttgtatatgaaatttttaatttaaattgttgtttttttatttttttgaatagtcgttatattttagtttgagggttaaatagattgaaggtaaaatttaattaagtagaattttgtaatgtttttattatatatagatttgttgttttttgtttgtttttagaatgaagtgatgaatttttagaggaagttgatttattttataaaaaaaaaaattaattgaaaattattttttatggttattgattaatgttagaaaatattaagaatatttttattgaaaaaatatttgtaagtgggagagaattagataaggaggggttggtagggggatggtgataagtatttattatatattatatattttgttatggaggttttataattgttatttttgaaaattgggtataattttttaatttaaatgtatataaaataaaattataggatagtttttatattagagtagtaaaattggtaaaatttaaaagtttgatattattaaatattggtaagaatatgaagtaatgaaattttttttttttaaaggatatagttatggaaaaaaattagggtttttttaatataattgaggatgtatttatttaatgattttgtaatttcgtttattaaatggtttttgaaatattcgtataaaaggatattattagaatttttgtagtagtatcgtttataagagtaaaatataaatttggaaaaatttaaatgttcgaaggagatgaatatatttaagttttttttttttaaggtaattgagaatttgtagtaaatattatggttttttgttatttttaattgttaagtttataatattcggaattagttttgtttttaaagttaagtgtttattttttacgtattaggaaatatatttggtatagagattattttaggaagttaaattttagatttttagaattagtagtaaagtgtaatgttagaagtgtttagtgagaggtattgtaggggattgggatggtttgttttaattttatatattttggggtaataatatttattaaatttggtatatatattagtttttaggttaagaaataagataggatataaatgtatttatttataaagtgaaaatgaaaaaagatagtataaagatttagaaatattttttaatattgtttatagaaataattttgaatgtaaattatatgatttttataaaaatagtaatatttttgttttgttttggatgaggatataaacgttgaagaatatatatatatagaggaatttcgtttattgttgatagtaggggaaataaataataatttttatttatagtttaagaaagaggtttttaaagagtgggagttttatgggtttttgagagattttttaaaaagatttgtgaaattaaaattatgtttatcgtaatattaagattttatattttttttttatttttatttttttattagtgtatggtggatttttttagaagttatatgatatattatattatgatattgattgtagaagtaagtatgagaatttagttattttttagtaagttagatattaaagagatttgtatttatgtagaataatgtcgttttttttaataagtttgttttagaaagtagagttattttttataaattgtatgatatttgcgttaatatgtaatgggtttattgttatttaaataagaaagtaaacgtttaaaaattttttttttaatttttaatgtagtaatattgataggtataatttatatagataaaagtattttggaatttttaatattttttaagagtgtagaaatttataaattattgatttttagtttattataggaagttttgttattagtataattattgtatttttgtttttatggttgtttttgttttattgtttttgattttttaaagatcgttgggaagagtttgattagtaatttattgaatggagattatattttgaatttttttttataatttagtgttttgtgggatgattttggggtgttttttgatggttagggtaataggtttttgttgatattattttatcgggaagttttagataggaatagtttttaggttttgaagtatttgaatattatgggatttttgttttatagaagttaatgagtacgatttaggtagatttataattttttttagaagttatttgggatggtttttattttggggttattttatataggttaatgtagagtatgtagtaattgtttaaataggatttggaaaggaatgaataatttatttagacgtttaatttggaatagatttaagtagatatttttggtgatgaaggatttagatgttagaaaattaggtttaaagatttttaagttattttttagtgtgatgttatatttttttttacgttttattggggaaggtaggtttgtttcgtttacggtggcggggaaatatttaggtatggaagtggtatgatagggttcgtgtttttgttatattttttattttttacgaggttttgcgcgttttaattttgtaggtaggtagatatcgggtcgggagtttggttgagttaggtatgggtggggttttgatagtaggagaggtgtgtaggaaaagacgtggtaataatgtgtgttatcgtaggttagggattaggttttttaggtcggttttcgatcggttaggtgattatgggggagtcgatttcgtttttgggtcgaggagtggagttcgcggttatttttagttttagcggttttttgttttttttttttttttttcgttggtttttgttaggtaggtttgttttggttgttttttagtgagcgggtgtttggggtttttgtttagatcgttaggttcgggtggatttcgaggatataggcgcgtaggggaggtttcgtgcgtcgcgagcggggttggggttttacgtttggaatttaggtcgtaggttgcgttggggggcgttttggtttttacgggggttttggatattagtttgtttcgttgttaggtggtagaagtagtttttacgcggtttttatcgtcgtcgtcgtttatttttcgtttatttttttttgcggcggggcgagttttttgttttggattttggtcgggcgtttagacgaaggagataggggaagggtagtttttggggaaacgtggggttaaagtcggagggttttttaggaaaaagggaaggttagcggtttgggcggttgtttttgagatttcgaggtcgtttacgtcggcgtttcgggttcgttttattgcgttttttttttttattttttttttttttttttgtagt

SEQ ID NO: 2138 - DNA, 5884 bp, Artificial Sequence
  chemically treated genomic DNA (Homo sapiens)
gttgtaaggaagggagaagagggtgggaggggaggacgtagtagggcgggttcgaggcgtcggcgtgggcgatttcggaattttaaagataatcgtttaggtcgttgatttttttttttttttggggagtttttcgattttggttttacgtttttttaaagattgttttttttttgtttttttcgtttgggcgttcgattaggatttagggtagggagttcgtttcgtcgtagaggaggatgggcgaggagtaggcggcggcggcggtggggatcgcgtgggagttgtttttgttatttgatagcgaagtaggttggtgtttagagttttcgtgagggttagggcgttttttagcgtagtttgcggtttgggttttagacgtgggattttaatttcgttcgcggcgtacggagttttttttgcgcgtttgtgttttcgggatttattcgagtttggcggtttaaatagaaattttaaatattcgtttattggggagtagttagggtaggtttatttggtaagggttagcgggaaaggagaaaggaaggtagggagtcgttggagttgaaaatagtcgcgagttttatttttcgatttagagacggagtcggtttttttatggttatttagtcggtcgggggtcggtttggggggtttgatttttggtttgcggtggtatatattgttgttacgtttttttttgtatattttttttattgttagggttttatttatgtttggtttagttagattttcggttcggtgtttatttgtttgtaggattgaagcgcgtaggatttcgtggagagtggaaaatatgatagggatacgagttttgttatgttatttttatgtttaggtattttttcgttatcgtgggcggggtagatttgttttttttagtggagcgtaggaaggaatgtgatattatattaggaagtggtttgaaagtttttgagtttgattttttggtatttaagttttttattattaggagtgtttgtttaagtttattttaagttgaacgtttaaatgaattatttatttttttttaaattttatttgagtagttattgtatgttttgtattggtttatgtggaatgattttaaagtggaagttattttaaatggtttttaaggagaattatgaatttgtttgagtcgtgtttattaatttttgtaaggtaggaattttatggtgtttaagtattttagagtttgaagattgtttttgtttaaaatttttcgataaggtgatgttaatagggatttgttgttttagttattaggagatattttagagttattttatagggtattgagttgtaggaaaaggtttaaaatgtaatttttatttaatagattattggttaagttttttttaacggtttttgaaagattagagatagtgagataaaagtaattataggagtagagatgtaataattgtgttaatagtaaagttttttgtgataggttgaaggttagtggtttgtagatttttatatttttaaaaagtattgaggattttaaagtgtttttgtttatgtaggttatgtttgttaatattattatattagaagttaaagggagaatttttaaacgtttatttttttatttaagtgataataaatttattatatgttaacgtaaatattatataatttatgaaaaataattttattttttaaaataggtttattgagaaaagcggtattgttttatatagatgtagatttttttgatgtttggtttattagaagatgattggatttttatatttgtttttgtaattagtgttatgatataatatgttatatagtttttgaaaaggtttattatatattaatgagagaatgagaataaaaaaggaatataaggttttaatattacgatgaatatagttttgattttatagatttttttgaagggttttttagggatttatagggtttttattttttgaggattttttttttaagttataaatagagattattatttattttttttattattagtagtaaacgaggtttttttgtatatgtatattttttagcgtttatgtttttatttaaaataaaataaaagtgttattatttttataaaagttatatgatttgtatttagaattatttttatgagtagtgttgaaaggtatttttaaatttttatgttatttttttttatttttattttatgaatagatgtatttgtgttttattttattttttagtttgaggattagtatatatgttaagtttaatgggtattgttgttttaaaatgtatgaagttaagataggttattttagttttttgtagtgttttttattggatatttttgatattgtattttgttattaattttgagaatttgaaatttaattttttgggatggtttttatgttaaatgtgttttttgatacgtggaaaatgaatatttggttttgaaggtagaattgatttcgggtattgtaaatttagtaattaaaaataataggaaattataatatttattgtaggtttttaattattttgaaaaaaaaaaatttaaatgtatttatttttttcgaatatttaagtttttttaaatttatattttgtttttataaacggtgttgttgtaaagattttggtaatgtttttttgtgcgagtattttagaggttatttagtgaacggaattgtagaattattgggtaggtatatttttaattgtattagaaaagttttaatttttttttatagttatgttttttagaggaaaagaattttattgttttatgtttttattaatatttggtaatgttagatttttaaattttgttagttttgttgttttgatgtaaaagttattttgtgattttattttatatatatttagattgagaggttatgtttagtttttagaggtggtagttgtaaagtttttataatagggtgtataatatgtaatagatgtttattattatttttttattaatttttttttgtttaatttttttttatttgtagatatttttttaatgggaatatttttaatgttttttagtattagttagtggttataggaaataatttttagttggtttttttttttatgaagtaaattaattttttttagagatttattattttattttgagagtaggtaaaaagtaataaatttgtgtgtgatgaaagtattatagaattttgtttggttgaattttatttttagtttatttgatttttagattaggatatgacggttatttagaagggtaggagggtaataatttggattaaagattttatatataaatttatattttatatgatgtatattattttttatttgttttaattaaatatttgattattttttattggttatattttatagataatgttttttaatgagaatgaaatagaaatatatttatacgtaataattaaattttttaaaatttagtattaggttggggtgggtgtttggggttttattaagatttttatatttttaaggtttttaagtttttatattttttttttatgaggtttgggaatatatagtagtatttttgtagtagattgttattgttgggatgaaatggatttttagaaatggaagaagtagttagggagattggaaggaggtttttaaagtatttggttttttgtagttttgggtttaattatttattttttcgagttttatttattagttcgtttagttttttattaaatatttatatagtttttattgtgttttaggtgatattttgagtgttagaaatatagttgtatagaagatagatttttttagagtttatagttattttagtgttaagtaaataagaaaattttgaaggatgattttaggttggtgagaattttgaaagtaattatgatgaagtgatggagagggtgttggggaagttttttttttagaagggattatggtgtagtagaggtttttgttaaggtaaggagtttagtatgtggaggtttgcgagaagggttttttttaaagtaggaaatagttagtgtaaaattataaaggaggaaatagtttgtaaattttaaaataaaataatatagacgaagttaatagttttagttgttttagtttttttagtagttgggattataggcgtgtattattacgtttaggtaatttttgttttttgttttttgtgtgtttttggtagagatggggttttattttattatgttgattaggttggttttaaatttttggttttaagtgatttattcgtttttaattgtaattgttaagtgaaatatttaattatgttaatagttaattggtaaaggataatttttttttgtttattaaattagtaatgatttaataatgagtatttttagtgttatatattgtttgtgtaagaggagtaaatgtttttatggaatattaagaatttgaaaaggaattttgttttttgaatatatgttaagtaaatgattagggaagtaaaaatatttgagaaaggataattattgtattttgattattgatagttaaaattagaaataatttggatgtttattgaaggtagtaaagttattagattatggattatttatttgatagatttagtgattatttatagattgtatttcgtataatagtaatgtgggtaaatatttatgttaagttttaaaaagagtgttaaattttatgtattatatggttttagttatatttatagaaatgttataaaatattaataattatttttaggttgtgaagttatgggtgatattttttttttttatatgttttagaaatttttatatttttttaaattattattgttttcgtaataaaaagaagttttttttaatttattttataaaatgttttaaatataattgatttttaaggggattattttattatttttttaataatttttttatgtaattttttatttttttttaatttgttgtataatagtgttttattaatgtgtttttttatgtcgaaagtttttttaatttgttgtttttaatattttttatatatttatttttagtggtaaagtttaaatagtttagttatgggtttaagattttttgttatatgagattgttttttgaataattttttttttatattttttttttttggttagatttttgtttttttttattttgtaatttttttagtgtttagtataatgttaattatttggttagtattttttaaaaatttaaaagtacgtttgagaatataaatattttttttgtgtttttgaatttgagagaggatatgggtttagttttaggaaagataagaatttagaagtaattaagtatagtgtggaaggtaggattacggaatagtatttgacgataaaaattgttgaaatagatggttgttgtttatagttttgaaagtaaatgagaagttgtagtttgtttttggttaagtagggtaagtgacgtaatatggttgtggagggaaaatgtagtgttagttagggaaggattaattatatgaattaaagtaggagtgggtttttatataggttgtgaaatatgtaatatcgttttattaaagaagtttaaggaattttatttttaggatgtgtagattgataggaaaattaatgaatattgtagaatggtattattgtagtttttttagattcggaagtagaagttaaatggtatttgggattatttttaggttaaaggttttaagaaaaataagttttattaattttattttgtaggtaaattaattttttaattggttgaatatagttttagagatgttaatagttttttatgagtttagagttaggtggtataggtttaattggtttaatagttgtaaattttgagagattgttgtgttaatgtttggg

SEQ ID NO: 2139 - DNA, 10326 bp, Artificial Sequence
  chemically treated genomic DNA (Homo sapiens)
cgtgagttttttgtttagttataaatgtaatttattgtatattttaaaattgttaagagtaaatgtttttataataaagaaaaagtatatgaggtgatggatatgttaattattttgatttaagtattttattttatatttttaaattttaatataatattgtattttataaatatatataattataatttgttaatgtattatttaaagaaatgatttaagtttgggtaatgtggtaaaattttgtttttataaaatatataaaaagaaaaaatagttaggtgtggtggtgtttatttatggttttagttatttagaaggttgaggtgggaggattatttgagtttaggatgttagtgagttgtgattgtattattgtattttagtttgagtaatagagtaagatttgttttaaaaaataaatatagaaataatatttaaaaatgatttaagtatatattgtttataagagttttattttagatttaaagatataaataggatgaaagtaaaaggatagggaaagatatgttatgtagatagtaattagaagagattaggagtggttatatataaataatttaattatagaaagattaatattgtataggtcgagtgcggtggtttatatttggaattttagtattttgggggattgaggcgggtaggttttttgagtttaggagtttaagattagtttggttaatatgatgaaattttgtttttattaaaaatataaaaattagttaggtgtggtggcgaacgtttgtaattttagttattcgggaggttgaggtataagaattatttggatttgggaggtggaggttgtagtaagttatgatcgtgttattgtattttagtttgggcgatagagagagattttgttttaaaaaaaaaaaaaaaaaaaaattttggaaaaaaaattaatattatataagtttatttatatgaggtatttagtatagatagaaagtagaatggtggttaataggtggttgttaagttgaggggaggagggaatggagagttgttggttaagggtataaagttttagttttgtaagatgaaaaggattgtggagatgggtggtggtgatggttgtataataatataatagtatttaatatgttaatattattgaattgtatatttaaaaatggttaagatggttaagtatggtggtttatgtttgtaattttagtattttgggaggttaaggtaggaggattatttgaggttaggagtttaagattagtttgggtaatatagtaagatttattttttaaaataaaagtaaaaaattagttaggtgtggtggtggatatttgtagttttagttatttaggaggttgaggtaggaggatcgtttgagtttaggtgtttgaggttgtagtgagttatgattgtattattgtattttagtttgttttaaaaaaaaaaaaagtataaattagtgtaagtatgttggatttatataaatgtataaattatttttagtttataggttttaaaaattaggttggatttggttcgtgttatttgttgatttttgttttattttatagggttgtgataatttatgtagtttaatatataataagttttttttgtatttattttgtagataaggaaattgaggtttagagaggttaatgttttttttttttgtatgtattgttataatttattttatatttgagatagggttttattttgttgtttaggttggagtgtagtagtttgattatggtttattgcggttttaattttttcgggtttaggtaatttttttattttagttttttattgggattataggtgtatattacgatgtttagttaatttttgtatttttttttttgtagaaacgggattttattatgttgtttagggtggttttgaatttttgggtttaaataatttatttattttagttttttaaagtggtgttattataggtatgagttattatgtttggtttattttttttatttaagatgtattttttgtttatatatttttttttttttttttttttttttttttttttttttttttttttttttttttgagatagagtttttttgtgttagtaggttggagtgtagtggtatgattttggttcgttgtaatttttgtttttcgggtttaagtgatttttttgttttagttttttaggtagttgggattataaatgtgtattattatgtttagttaatttgtgtatttttagtagagatagggttttattatgttggttaggttggttttaaatttttgattttaagggatttatttgtttcggttttgatttttttgtatagaattatatttggttttggtttttttgtatagtttttattttttttttgagattttttatgtatttattgggagtatatttttttttatatatttgagtatagtaagagtatttgttttaaaatttttgttatttttaataatttatttttggaagttaatttttattgattatttttttttttaagtatgggtgatatagtattttttttttatgtgtttgataaatttgtttttattttagaaattgtgaatggtatatattgttgagattgtgtgttttgttatatttttttggagggtgtttaaaaattttttttaattttgtttttgtttgtttgttattttagtaggtagaaaattttgtgttttgaggtgaatagttgaaatttttgtttaggttatttaattttagttgggttttttggagttagttggtagatgtatagtttaagggttatttagagatttgggtagaatttagatgtagaatttggggtttttttttttggttttttttttgagaattttttttttttttatttagtttttgtggtttttgtttttgaggttatgatatgggtagtgtggtttgttggttttgagttagtaaattttggttttagtaagatagaaggtatattgatagaaagaagttgttttggtaaggatattagtgtagggatggttttagtgagtagaatagtatatgtttgtagtaggtaagattggagttaagttgattaaaatttaattttaaagaatatataagtaataaatatatgaaaagatgtttattttgattaatatttaaggaagtataaattagaattatattgaaatattttagtttattagattggtaaagatgaaaaagattgataatgtttattgttggtgaaggttataggtatttttatattgttggtgagagtaaaagtttgtgtaatattttttatgtagggttatattttagtatttattaatattttaaaatgttaattttaagattttataattttatttttagtaatttattttatagtaggatttattttgttgtttgaagatttatgtttagaattatttacgaaatttatttaaaatagtatatatgtttgaatttaggagtttgaggttgtagcgagttatgattatgttattgtattttagtttagtttgggcgatagagtaagattttgtgtttaaagaaatgaaaataaaaataaataaaatagtatatataggtaataatttaaatgtttattgtagaaattatgattattattgttttttttttagaggtagggtgttattttgttgtttagattaattttgattttttgtgatttttaagagatttttcggtttttgttttttaaagtttttggattataggtgtgaggtattgggtttagatattgtagggattattaaattatggtgtatattattattaaaggtatgaggtaggttttatatgttgatttagaaagatggtgtaatattataggggaataagaaggttgtaaagtggtagtatagtaggagtttttaagaaataggtatttgttttagtttaagaagtgtttggttgggcgtggtggtttatatttgtaattttagtatttagggaggtttaggtgggcggattatttgaggttaggagtttaagattagtttagttaatacggtgaaattttatttttattaaaaatataaagaaattagttgggtttggtggtaggtggttgtaattttagttatttaggagttgaggtaggagaattatttgaattcgggaggtcgaggttgtagtgagtttagatcgtattattgtattttagtttgggtgatagagtaagattcggttaaaaaaaaaaaaaaaaaagatcgggtgcgaggtggttttcgtttgtaattttagtattttgggaggtttaggtaggaggattataaggttaggagatcgagattattttggttaatatggtgaaattttatttttattaaaatataaaaattagtcgggtgtgatggtatacgtttgtagttttagttatttaggaggttgaggtaggggaatcgtttgaaattaggaggtggaggttgtagtgagtcgagattacgttattgtattttagtttggcgatagagtaagattttattttaaaaaagaaaagaaaataaataaataaataaaatttttaaaaagtaaaagtgtttgtatggatttgtgtttaattatttatagtggttattttttgggggaggtgaaaggggattttgttaaagaattttttttttgtattgtttttttttaattgagtttgtattaattttatatttaatattttttttatttttgatgtttataggttgttttagttggtggaaggagaatttgtatttttggttttggtaaagtgtagaaggggataagggtattgttttgtatttgtataggtttttgttttttggggttagtttaatgaattttagtggtgttttttgggaagaatatagtggatatttatttgttagttagtagataaattattgaagtttatgtttggtagtttttaatgttatggggattgtaaggttgttatgttttatagttttttgatttagaagattagtggtgatagatattttttagttttgttcgggagagtagttttgtaatgcgtttgtggttttagatgtgggcggtttgtgtgaatttgtcgtgtaaagtttacgttattaattgttgtagttattttttgaattaggttgagggtttttgttgtgtatttagagatagttgggtgataaattatttttaggttggggatgttttagatttgtgatgggattgggtagatgtatttgggaaggtgagtttgtgttttgggttttttaattttttaagttagtatgaaatttagaaggtagagagggatatgtggttttttaattcggggtttagggagttattgtggtatttgagagcgttattttagttttattttttttggtgttttggttttgtgtattttttagagatggtaaaatttgtagttttgattttaaggattataaattaatttttagttttgtaggggttatgggttttgttgtggttagtgtggtattgagtttgttaggtagaatttttaattatggaaggaattttgtttttttagtgattgaattgatttttgtgggggtgtttttgtggggtgagaatgggtatatttgggttttagttgtgatggttatggggtggagttgaggtttaggtttagggttgggaaagtttttattaatttcgaggtatttgggtgttttagggtagaagaggagttaggaggatgggtatgttttattggagttgtgtgtggggtagtaggtgagggtgggattttagagggagggttaatttagttaagtagaggaaggggaggagagggtttgttttggaaagaatattatttttttagttttttggggtttggatagtttgtttttgtgatgagttggaggatgtgggttttgtttggattttttttttttttttttgtttttattttttttttttgtgatttatgttgttttgggtttattttttttttagagttgttacgttatagttgataggtagggtaggcgttttaattattattaatttttttttgagatagagtttgagatagtattaagagtgggtatttttttagcgtgtttttaagtagtattttagagtttcgtttttgggtatttataatatgaatatcgtttagaagtaagggtagtttttgtaggtggggcgggggttggaaaatatttattaaacggttgagttgggtgtaggggatgtaatatgattaaatagggttttgtttttaggagttttatgtagggataacgtatagtgatgatttttaattgtagtggggtagtaaggttgtgggaggggtgttttgggtagagtaggcgacgtgggtatttttttattaagatagtaggaagagtacggatattattttttcgttttatttttagatttttaggggattgtgttaatatttttattttagttttggtttatggttattgtttaatttttgggttttgttagtttagggttgtgtagaaggagagttgtttgtgtttaggtttaggggtttcgtttagttaaggaggtttattaggggattggggaaaggttttatgaaggattaggtttgtgatggggagggaagatggtagaggggatagtgggaagtagagtagtaggggttttttttacgtttttttgtattttttttatttatttttgtttatttttttttgttttgggtatgtgtttttgtttatttaatatttttgtagtgttaagtttagttttgatttttttttgagttgtggtttagcgtttttataggtatttattttacggatgtagtattgttttttatttttttttttgaaagtgtgtgggaaatgttttttggtgttattttttttttattttgttttttttgtattttttttatgaggtgtttgttgtttttgtatttgtttttagttggttttttagattttattttttttgttttttgtttatttttatttttgttagtattttatatattttgtgtttaatagtattggggatttttattgtgttgaaggaagtttttatgtggtttagagagggagttggtttttgtttttatttttagtattattttttggtataggttttatgtttttaggttttagttgtttttggggtattaaggtttgtatttttttttttttttttagtagatagaagattttgttggataggtgtttattttaatagtaatttttgaggttgttagttttttgaatggtttagaagaattagattttttttcgtttttattaaaaaagataaaatatggttaggtatgttggtttatgtttgatattttagtattttgggaggttaaagtaggtgaattatttgaggttaggagtacgagattagtttgataaatatggtgaaattttgtgtttattaaaaatataaaaattagttaggcgtggtgatttatgtttgtaaatgtttgtaattttagttatttgggaggttgaagtaggaggattatttgaattcgggaggtagaggttgtagtgagtcgagattacgttattgtgttttagtttgagcgatagagcgagatttcgtttaaaaaaaaaaaatatatatatatatatatatatatatatatgtataatagtttttgtgtaatagtaagtggatgtagtaattggtgtgagggtaatttggagagtgtgtttggaggtatagagatgtttagggttgtttggattgtttttatgatggtggtttgttttgtattaggtgagtgtttaggaaaggtgagggtagggtagtttatagttttatagtggtttagggaagtagggtaggtaggttatgaggtttagtaggtatttgggttagattttgatattgaggttatggaatgggtggggttttgagaatagattaaagtgattatgggttgaaggttatgtttatagatttaaggcgggataggttgtgttgggtagtgatgttagttaggttttttagcgggattgggggtgttaggggtagttttgttttaggtggtagatattggtttttttttttgtttttataatcggtttgttattaggtgttgtttgagttgtggtgaggtttttttggtgatatttaggagtagggagtttgtgagtaagggtgtatgtatttgttttgattgtttggttttgtggttaaggatgggggaaggtagttttgtttgtagttttattttatttataaagtattgtggtgttttttgttggggtatgtgttgagtggtgtttcgtaggtattgttttcgggaagtttataggtttatgtggaagttggtgggaatgggttaagaagagaggtgttaggagttaggtattgggtaggttttaggtttttgagttttagtttttttatttgtaggagggtggtgattttgttttgtttagtttattaggtatagatgtaagtttttagtgtagaggaaaagtagagaatttttttttagatggttatatttttttgtcgttgtatttaatttttcggttttattttgtagtttttaggtgttatatgtggattttgttttattattttttttttttgtttagaaacgaggtttgttgagtttggagttattttattttttgtttttaagtcgtttgtttttgggttagtttgtggttggtttggtttgattttatatagatgtgggtgtttttttattgttggggtagtagttgtttattttggggtttgggttagtttttagttgtggtcgttgtgtttgtgtttttttaggttttggtggtgattttaattttgtttttatatattttaagagtaggttgattgttttttttatttttatttttttagtaattgttgtaagaacggatagatattgttgtagagaatttgttacggtgttttatgttgtggttggtggttttaggttgtacgttttattttaggaaagggtgaggttttttgattattagttttaataggggattgttttatgggtatttgtatacgttgtcgggagtggggtagagtggggttagagtagtgtttgttgtttattggtttgtgcggttttttaaggttgtaagtttgtgtgcgtgtttggtttttttttttttttattagtaattagttttgtataattaggttggttttgttttttgtttaggggttatcggtgtattatttggagttgtaaatggggtgatagggcgttagcggtttttttatatttaagtattttttgatatttagttttttatttttagttaatttttggtttttttagggattttggggtttaggttttacgttttagtattcgggggttttgtttttttggtgttgtttttttttgtaggtgttttggaataggggtgtaatagagtttagaaagtgttatttgttgtatggatattttgttgttattttcgtttatttttttggggtagaatagttggatgggtttttatttaagaggataaaagggagagagaatgtatagaggttgggtttggtgtttacgtttgtaattttaatattttgggaggttaaggtaggtggattttttgaggttaggaggttaagattagtttggttaatatggtgaaatttcgtttttattaaaaatataaaaaaaaaaaaattagttgggtatggcgggagatgtttgtaattttagttattcgggaggttgaggtaggataattatttgaatttaggaggcggaggttgtagtgagttaagattatattattgtattttagtttgggtgatagagggagattgttttaaaaaaaaaaatttgtttagaatttgtttgtgtgattttgggtaagttattttttttttttgggatttagttttttgtttgtgaacggggatagtgttttttttttatagagttgttgtgagaattaaagtagaaaatgtatttatggtggttgttggtagtgattagtttttttaattttgatttttttgtaggatggggtttgggttcgggaatgggggatgggttggtagaggatgattgttttagagaggagttttttcggtagatgtggagatttagttgagttagaggttaggatttaagtttgagggtgttttttatattttgtagttatgagtttttggttgagttaaatggtttttttgagtttagttttttattagtaaagtttggatagtggtttaggacgttggatattgtgtgagtgttaggatataggatattgtgtgagtgtaggtggggatttatggagtattttgttggggagtaatttatggggagtatttttttagagagggatgatttgtatagggtttttagtttagttttttgtagg

SEQ ID NO: 2140 - DNA, 10326 bp, Artificial Sequence
  chemically treated genomic DNA (Homo sapiens)
tttgtaagggattgggttgagggttttgtgtaaattatttttttttggaggggtgttttttatgaattgttttttagtagagtgttttatgggtttttatttgtatttatatagtgttttgtgttttaatatttatatagtgtttagcgttttggattattgtttaggttttattgataaggaattgagtttagaaaggttatttgatttagttaaagatttatggttgtagggtgtaaggaatatttttaaatttagattttggtttttgatttagttaggtttttatatttgtcgagaagatttttttttgggatagttattttttgttagtttattttttattttcgggtttaggttttattttgtaggggagttagggttgggggaattggttattattaataattattataggtatattttttattttaatttttataatagttttgtaagggagaagtattgttttcgtttataggtaaggaattgagttttaaggaggggaaatgatttgtttagggttatatagataaattttaagtaaatttttttttttgagatagtttttttttgttatttaggttagagtgtagtggtgtgattttggtttattgtaattttcgttttttgggtttaagtgattattttgttttagtttttcgagtagttgggattataggtatttttcgttatgtttagttaatttttttttttttgtatttttagtagagacggggttttattatgttggttaggttagttttgattttttgattttaagggatttatttgttttggttttttaaagtgttgggattataggcgtgagtattagatttagtttttatgtatttttttttttttttgtttttttaaataaagatttatttaattgttttgttttagaaaggtggacgagggtggtagtagggtatttatgtaatagatggtattttttgaattttgttgtatttttgttttaaggtatttgtaaagaagagtaatattagaagggtaaagttttcggatgttggagcgtgaggtttgagttttaggatttttaggggagttagaggttggttagagatgaggggttgggtgttaggaagtgtttgggtgtgggaaggtcgttgacgttttattattttatttgtaattttagatggtatatcgatagtttttaggtaggaagtagggttagtttggttatataagattgattattgataggaggaggaaaaaattagatacgtatatagatttatagttttaaaggatcgtataaattaatgggtagtaggtattattttaattttattttgttttattttcggtagcgtatataggtatttataggatagttttttgttaagattgatgattaggaagttttatttttttttagaatggagcgtgtagtttggaattattagttatagtatgaaatatcgtggtaagttttttgtagtagtgtttgttcgtttttgtagtagttattggaaaggtgggaatggggaaggtagttagtttgtttttgggatatgtgagggtagggttggagttattattaggatttggggaagtataggtataacggttatagttgagagttgatttaggttttagaatggataattgttgttttagtagtggagaaatatttatatttatgtagaattaggttaggttagttataggttaatttaggagtagacggtttgagagtagggagtgggatggttttaagtttagtaggtttcgtttttagatagggaagggggatggtagggtaggatttatatgtgatatttgagagttataaagtaggatcggagagttgggtatagcgataagggggtatggttatttgaggggaagttttttgttttttttttgtattgaaaatttatatttgtatttggtaagttgagtagggtagggttattatttttttatagatgaagaaattgaggtttagagatttgggatttgtttaatatttggtttttgatatttttttttttggtttatttttattagtttttatataagtttgtgaatttttcgagggtagtgtttgcgaggtattatttagtatatgttttagtagaaggtattatagtgttttataaatggggtggagttgtaggtagagttgtttttttttatttttgattatagggttaggtagttagggtagatgtatatatttttatttataggttttttgtttttgaatgttattagggaagttttattatagtttagataatatttggtaataggtcggttgtgagagtaggaggggaaattagtgtttgttatttgggatagagttgtttttgatatttttagtttcgttggggagtttggttgatattattgtttagtatagtttatttcgttttggatttgtggatatagtttttagtttatgattattttggtttgtttttagagttttatttattttatggttttagtgttaaagtttggtttagatgtttattaggttttatagtttgtttgttttgtttttttgggttattgtgaagttgtgggttgttttgtttttattttttttgaatatttatttaatatagagtaggttattattatggaggtagtttaggtagttttgagtatttttgtgtttttaagtatattttttaagttgtttttatattagttattgtatttatttattgttatatagagattattatgtatatatatatgtgtgtatatatatatatattttttttttttagacggagtttcgttttgtcgtttaggttggaatatagtggcgtgatttcggtttattgtaatttttgtttttcgagtttaagtgatttttttgttttagttttttaagtagttgggattataagtatttataagtatgagttattacgtttggttaatttttgtatttttagtagatatagggttttattatgtttgttaggttggtttcgtatttttggttttaagtgatttatttgttttggttttttaaagtgttgggatgttaggtatgagttaatatgtttggttatattttgttttttttaatgggggcggggaagggtttggtttttttggattatttaggaggttggtagttttagaagttattattgaagtggatatttgtttagtaaggttttttgtttgttgggggaagaggaagaaatgtagattttggtattttagaagtagttggagtttggggatatggagtttgtgttagaaaatggtgttggaaatgggagtaggggttagttttttttttggattatatgaggattttttttagtatagtgggaatttttaatgttgttgggtatagagtatgtaaggtgttgataggggtagggatgggtaggaggtaggagggatggggtttgaaaggttagttggaggtaagtatagagataatagatattttatagagaaggtgtagggaaggtagggtgggagagagatggtattaagaagtattttttatatatttttagagaagaggatgaggggtagtgttgtattcgtgaggtaaatgtttgtgggaacgttgggttatagtttaggaagaagttagggttggatttggtattgtagaggtgttgggtggataagggtatatatttagggtagaggggagtaggtaagggtgggtgggagaagtatagagaggcgtggaggagatttttgttgttttgttttttattgttttttttgttattttttttttttattataggtttggttttttatgaggtttttttttagttttttagtaggtttttttagttggacggaatttttgagtttgagtataggtaattttttttttgtatagttttgaattgatagggtttaagggttgagtagtggttatgggttagggttggagtgaggatattggtatagttttttgggagtttggaggtgagacgggaaaatgatgttcgtgttttttttgttgttttggtgaagaggtatttacgtcgtttgttttgtttaaaatattttttttatagttttgttgttttattgtagttgaaggttattattgtgcgttgtttttatatgaggtttttggaggtaagattttgtttgattatgttgtattttttgtatttaatttaatcgtttgataaatgttttttaattttcgttttatttgtagaggttgtttttgtttttggacggtgtttatgttgtgggtatttaggagcggggttttgggatgttatttgaagatacgttgagaggatatttatttttgatattgttttaaattttgttttaaaaaaaaattaataataattaaaacgtttgttttgtttgttagttgtagcgtgatagttttgggaagagggtgagtttagaatagtataaattataggaagagaaaatgggggtagggaggggagaggaggatttaagtagggtttatattttttagtttattataagaataggttatttagattttaggaaattgagagggtgatgttttttttaaaataaattttttttttttttttttttgtttggttgggttgattttttttttggaattttatttttatttgttgttttatatatagttttagtggggtatatttatttttttggttttttttttgttttaaaatatttaaatgtttcggggttggtagaagtttttttagttttgggtttagattttagttttattttatggttattataattgaggtttaagtatgtttatttttattttataaaggtatttttataaaggttagtttaattattgaggaagtagagttttttttataattagaaattttgtttgataaatttagtgttatattggttatagtagaatttatgatttttataggattggaaattagtttgtaatttttgaggttagggttgtaaattttgttatttttaagagatatataaggttaggatattagaggaggtaaagttagggtggcgtttttaaatgttatagtggttttttgggtttcgagttggagggttatatgtttttttttgttttttgaattttatgttgatttgagaggttgggaagtttaaagtatagatttatttttttagatgtatttgtttagttttattataagtttgaggtatttttaatttggaggtgatttgttatttaattatttttgggtgtatagtaaagatttttagtttgatttaggagataattgtagtagttggtgacgtgagttttgtacgataggtttatataggtcgtttatatttgaaattataagcgtattatagagttgttttttcgagtagagttgagaagtgtttgttattattaattttttaagttagggaattgtgagatatgataattttatagtttttatgatattgagaattgttagatatggattttagtgatttgtttattgattggtaagtgagtgtttattgtgttttttttaagaaatattattgagatttattaaattgattttaggaggtaagaatttgtgtaggtgtagagtagtgtttttgtttttttttatattttgttaaaattagaggtgtaggttttttttttattagttaaagtaatttgtgagtattaggggtggggagagtattaaatataaaattaatgtagatttagttgaagaaaaataatatagaagaaaaattttttaatagggtttttttttattttttttaagaagtagttattgtgagtagttaggtataagtttatgtagatatttttgttttttggggattttgtttgtttgtttgttttttttttttttttgagatggagttttgttttgtcgttaggttggagtgtagtggcgtgatttcggtttattgtagtttttattttttggttttaagcgatttttttgttttagttttttgagtagttgggattataggcgtgtgttattatattcggttaatttttgtattttagtagagatggggttttattatgttggttaggatggtttcgattttttgattttgtgatttttttgtttaggttttttaaagtgttgggattataggcgagagttatttcgtattcggttttttttttttttttttttgatcgagttttattttgttatttaggttggagtgtagtggtgcgatttaggtttattgtaatttcggtttttcgggtttagatgatttttttgttttagtttttgagtagttgggattatagttatttgttattaagtttagttaatttttttgtatttttagtagagatggggttttatcgtgttgattgggttggttttgaatttttaattttaagtgattcgtttatttaagtttttttaagtgttgggattataggtgtgagttattacgtttagttagatattttttaagttgaaataaatatttattttttaaagatttttgttgtgttgttattttgtagtttttttgtttttttatggtgttgtattatttttttaggttagtatataaaatttattttatatttttaatggtagtatgtattatggtttaataatttttgtaatgtttaggtttagtgttttatatttgtaatttaagaattttgggaagtagagatcggaggattttttgaggattataggaggttaagattagtttgggtaatagagtgatattttgtttttaaaagaaaaataataataattataatttttgtaatgaatatttggattgttgtttgtatatgttattttatttatttttatttttatttttttagatatagagttttgttttgtcgtttaggttgggttggagtgtagtgatatgattatagttcgttgtagttttagatttttgggtttaagtatatatgttattttaagtgaatttcgtgaataattttgggtatggatttttaaataatagagtgagttttattgtaggataaattgttaggggtagaattgtggggttttagggttagtattttaaaatattgatagatgttgagatatggttttatataaaaagtgttgtatagatttttgtttttattaataatgtaagaatgtttgtaatttttattaatagtaaatattattagttttttttatttttgttaatttgataggttaagatattttaatgtggttttaatttgtatttttttgagtattagttaagataagtatttttttatgtatttattatttgtgtgttttttggggttgaattttaattagtttggttttagttttatttgttataagtatatattgttttatttattggagttatttttgtattagtgtttttattaagatagtttttttttgttagtgtgttttttattttgttgaagttagaatttattaatttaagattagtagattatattatttatattataattttagaagtagagattataagggttggatagggagaaaggaaatttttaaaagaaaaattagagaagagagttttaaattttatatttaaattttatttaaatttttggatgatttttgaattatatatttgttagttaattttaaggagtttagttaaggttaaataatttgaatagaagttttagttgtttattttaggatatagagttttttgtttgttaaaataataaataaataaaaataaaattaaaaaaaatttttaaatattttttagagaaatataatagaatatatagttttaataatgtatattatttataatttttaagataaaaataaatttattaaatatatgaagaaagagtattatgttatttatgtttaagagaaaagataattaatgaagattgatttttaggaataagttgttggaaatagtaaaggttttaaagtagatatttttattatgtttaaatatataaaggaaaatatgtttttaatgaatatataggaaattttagaggagaaatagaaattatataaaagaattaaggttaggtgtggttttatataaaagaattaaggtcgaggtagatggattttttgaggttaggagtttgagattagtttgattaatatggtgaaattttgtttttattaaaaatatatagattagttgggtatggtggtgtatatttgtaattttagttatttgggaggttgaggtaggagaattatttgaattcgggaggtagaggttgtagcgagttaagattatgttattgtattttaatttgttgatatagaaagattttgttttaaaaaaaaaaaaaaaaaaaagaaagaaagaaagaaaaaagaaagaaaagaaaatatataagtaaaaagtgtattttaaataaaaggaataggttaggtatgatggtttatgtttgtaataatattattttgggaggttgaggtgggtggattgtttgagtttaggagtttaagattattttgggtaatatggtgaaatttcgtttttataaaaaaaaaaatataaaaattagttgggtatcgtggtatgtatttgtagttttagtaggaggttgaggtaggaggattatttgagttcggggagattgaggtcgtagtaagttatgattaggttattgtattttaatttgggtaatagagtgagattttgttttaaatatggaataaattataataatgtatataagaagaaggaatattaatttttttgagttttagtttttttatttgtaagatggatatagagaggatttgttatatgttaaattatataaattgttatagttttatgaggtagaatagaggttagtaaatgatacgggttaaatttagtttaatttttaaaatttgtgagttaagaatggtttatatatttgtatggatttagtatgtttatattggtttatattttttttttttttgagataggttggaatgtagtgatgtaattatagtttattgtagttttaaatatttgggtttaagcgatttttttgttttagttttttgaatagttgggattataggtgtttattattatatttggttaattttttgtttttattttagagaatgggttttattgtgttgtttaggttggttttgaatttttagttttaagtgatttttttgttttggttttttaaagtgttggaattataggtatgagttattatgtttggttattttaattatttttaagtgtatagtttagtgatattaatatattaagtattattatattgttgtgtaattattattattatttatttttataattttttttattttgtaaaattggaattttgtatttttaattaataattttttatttttttttttttttaatttgataattatttgttaattattattttattttttgtttatgttaggtattttatataagtggatttatatagtattaattttttttttaaagtttttttttttttttttttttgagatagagtttttttttgtcgtttaagttggagtatagtggtacgattatggtttattgtaatttttattttttaggtttaagtgatttttgtgttttagtttttcgagtggttgggattataggcgttcgttattatatttggttaatttttgtgtttttagtagaaatagggttttattatgttggttaggttggttttgaatttttggatttaagagatttgttcgttttagttttttaaagtgttgggattttaggtgtgagttatcgtattcggtttatatagtattaatttttttgtgattggattatttatatatggttatttttgattttttttggttattatttgtatgatatgtttttttttatttttttatttttattttatttgtgtttttagatttaaagtgagatttttgtagatagtgtatatttggattatttttaaatgttatttttgtatttattttttgagataggttttgttttgttgtttaggttggaatgtagtggtgtaattatagtttattgatattttgggtttaagtgatttttttattttaattttttaagtagttgggattataagtgggtattattatatttggttattttttttttttgtatgttttgtagggatagggttttgttatattgtttaggtttggattatttttttaagtggtatattgataaattataattgtatatgtttatggagtataatgttatattagaatttaggaatataaggtgaagtgtttaaattaaagtagttaatatatttattattttatatattttttttttgttgtgagaatatttatttttagtaattttgaaatgtgtaataaattatatttatggttgggtaggaagtttacg

SEQ ID NO: 2141 - DNA, 5914 bp, Artificial Sequence
  chemically treated genomic DNA (Homo sapiens)
  unsure 5009: n is a or g or c or t
gatagcgtgggtattattaggtttttcgtagggttatttggtaagtttagtttttttgggttgaaggttgatttttgggttttaaggatattaggttagggggtaaaggatttttgaatttagttttttagatttttaatttgatattttttagatgaagtcgaggttaggtatttagtgtttatagtaggttgaaggttttttataaggttgtgatttttaagataatatatataaagtttggggtgttgggatagagttttaatagggtgttagatatagattttattgtgggatttaggtagtttttattgattaaggtttgtaatcgtattttatttggttgagaaggtgtaaggtgggcgggaatcgaggttcgggcgggtaggagttatatttaattttgttttcgttttagtttcgttttaggtaaaattttgttggttttattgagataggtttttggagaattataggagtaagagtataaagttttaaggagaatacgtttattttatttatggagtaatggcgaaggttagagtttttttcgttttttttagattatttttttgttttttgtagtattatggagtaatggtgaaggttagagtttttttcgttttttttaggttattttttagttttttgtagaattatggagggatggtgaaggttagatttttttcgttttttttatattattttttcgttttttgtagtattatttttttaaattttaaaattgtaaataaaggttttttttttttattttattttttttttagttatagttttattttttagtttttttttggtgtaaaattttttagaagggtgtttagtttattttttttgtttgaatttcgagggttagtttttatgtttatgacgtttttgttaaagttattagtgattttagttttcggttttaaggaagtttttaggtttttattcgtttatttgtttttttttttagatttagtttttttatttttttttttttttttttggttagaattttgggtattttttttttatgttggggtttagttttggtttttggttttttttttttttagttttatttatttttggttattttatttagggtgggagttttaaataggatatgagtgttaatgatatttttacgtttagtttagattatatgtcgtaaattgtatattgtatattttgttttttttgttggtttataggtttttttcgtggatggatttgtagggttgtttttttttatgtcgtttttagtcgtatttgaaggtttttttagttggtttttttagtttaggttttaattagtaggaagtttgttaggtttttttttagggaggttttaaatttgttttttaaatttttttatgttttatttaagtttatattattttttatttggattatagtagagattttttgtattgtttttttttttaattttttattagtatattagttagaggttttttggagaatagaaggggtttagaattttgtagcggcgtttattgtatatataggaagaatttaagtgttcgtaggtagtgagttatttttttaggtattgtggtgattcgggattatgtgttttttcgaagtttgtatatgtattttaatgatgtaagttattatcgggcggttagttttgttagttgacgttttaaatagttggtatggggtatgtatatagtaggtgtttaataaatgtgtgtcgggttaagataggtttaaagttattttaaatgtttaggtagtggtgtatgtaggggttagttttgaagttggtttttttttattcgggagattttttagaggttttagtttttaggatgtagtgtttagagtaatattttttagtgtacgtttggttgtgtttttgtttagcgtttttagggttatttttttttttagatttattttttgtttcgttattttattgtatatttttggttttagttttttttagtggtttagttttttgaatattttaagtttgggtttatttttaagtcgttatttatgttatttttttagttaggatgttttttttatatttaaataattcgtgtttatttttaagattggttgaggtattattttttttgagaagttattttttttaaatttgagtttagatgagttaaagttttttttttttttagttagtttggatttttttattcggtagaattgtcgttttgtttttttgaagcggtgaatgttttggggttggggacgtataggttcgttggtttataattaaagtcgttttttttggaggaggaagtttaggggtgttagggttttatttgtttttttttttatttagtttaaagggtaatttttttatatttttttagaattaggaagtttttttatttatattgagtttgtttatgataaaaaaaaaggttttttcgattttttttgtttaattagttttttggttatttgaggttttgttttatttggaggaagatagtggtaagtttttagtatttttattatattttagcgttagaggatttttagtttttttcgtatatttttgggtagtttggtaatttattttatttttttttgtcgttttattttttaagttttttttagggaatttaggaggcgtttggaatttgttggggatagttttttatatttgttttattgagtaagggtttatgtggatgtttatttttttttaggagttttaaatttaagatattttgagatttttgttatttatttttattttatatagtcggtttttttgtgtagtttttttaggaaattttggttggatttgggttttcggtttgattgtattttttttaagtttttaggggggttagtggtgattatttttgaaaacgagtttggtagaggatttggggatacgtattttagatgtaaatacgtttgtattttttgggttggaattttttcgagcggtatattgtattcgtgggtttgttaagaaattattttatagagggtagattgattggataaaaggtatttggtttttaaattgattgacgtgtgtgaatgggagtttttagaataaagatttaaagatatgggggaaataggttgggcgcggtggtttacgtttgtaattttagtattttgggaggtcgagggggggcggattacgaggttaggagatcgagattattttggttaatacggtgaaatttcgtttttattaaaaatataaaaaaattagcgggggttgtggcgggcgtttgtagttttagttattcgggaggttgaggtaggagaatggcgtgaattcgggaggcggagtttgtagcgagtcgagatcgcgttattgtattttagtttgggtgatagagtaagatttcgttttaaaaaaaaaaaaaaaaaaaaaaaaaagatatgggggaaattgttatttttgatgtttaggtttaataaagtatggatatttatgcgggaatatagatgaattaagggatttgtattaatgtttttggatcgtaaggggaagcgtagcgagggttgttggtttagattttttgaattttttgagtagtattttttttttttgggtatggagtaggatttttttggaatggggttttatgttttatagttaaataagagaggttagataatttatggttagtttttaaatataaaggtggagggaaagttagagtaatatttttaggtttgatgtttggttgtgtggaaaggcggggttttgatttttatgatttgttttggggaaaatggattttagtttttaaggttagtttcggggaaaatggtattgagagataggagagtaagagaaggttagagaaatattttttttttcgaagttgtttttgaggtttttattttggggtattgttttttgatgtttaatatatttgagttgttgaacgaagggtagttgttgaattatttttacggtgatttggaatggtttagttagtcggttttgggttatttggttttggtttttttgtttattaggattttggtcggttttcgttcgtttttgcgatgttcgttttatttagttttatttttgtagttttttgttttgtggagcgatgattgatatatggtagggggatattggttttgatatttgagtttgtgtttagtttttgtttggggaggaggtggggtaggagttttgaatgagtatttttttatttagtgatagttaggggtacggagaatggtgtttaggttaagggtagggtttgggttaagtgtgcgtagcgtggggtgtgtgtgttttagcggtttttgttgcggagggcggtatgaggtttgtttatttgtgtgttggtatttttggtggtttttgtaagggtggggaagtggtaggtagggtgaaatggggaaaagtgggtttttaattgtttttagtagttttcgggtttggggagggaagtgaggaggggtttagagttgttttttggttatttttttggggttttgtgtagatttttggtagggttaggttatattatattttttataattttttttgatttttttttttaattttttattattattttttcgttttttttttttcgtttttgttttttttttattttttttttttttttatttttcggttttattttttgtttatattgtttttttttaggtttaaagtggatatcggtgttgtttgagggttagagtgtttatttttagtagttcgggtatcgggtaggatttaagttggagggggttggggcgggcgaagtcgggtacgggggcgagttcgttggtgggcggggtaggggcgggtttttcgaggggaggggcgggttcggttagtgagagcgtagaaatcgtggtacgggcgttttcggaattggcgattgtaaagcgcgagggttggaatttagatttagaggggcggtttttgttgtaagttatttttcgaaagggcggggtcggggtttatttcggaaggatcggtgtttaggttattntggagcgtttattttatcggtattagtgtttaagttcgtttttgtaaaggtaggtattcgagtatattttggagagggcggtttttgagtttcgaatttcgaatttcggcgtagcgtcgtatttttgtttaatgaggtgtttaagatatgtatggtgcgggtgttatgtttttttttagtatttttgtatttcgggatgggggagggcgttaggcgtagttttcggatttttaggggtttttttagttaaattttattagcgggggttaggaatttaggggtttaggtgtgtagttagttgttaatgtggtaaaatatggggaagttatttgtagcggtaaaatttagtttttattagttggaggtcgggcggggaagggtggggatagatagtatttcgttgtgggaggtaaggtagagttattggggagtttggaaggttgagatatgttttttatacgtaagattattttagaagttttttggagttttggttgttggttataggggaaggtagattttttttgagagttgtattgtgttggggatagggttattgtgggtttacggagggtttttaggtatagggatttatattagttttttggttatagaaggcgttgatgatttgaggtggatttagttattatttcgagtttttgtttttttttaaaagtggggtatggtatatttttgtgttaggtaattaggtattgagtttggtttatttgtaggggtcggggggagtagtttgtttttgtttttttttttcgggaggttgtgtgtttggagattagagttgttaaaagtggaggagggggattttttgatgtgttttttaaggtttaggtagtaggagagttttattggggagggggttttgtagtgttgtttttttttgtagg

SEQ ID NO: 2142 - DNA, 5914 bp, Artificial Sequence
  chemically treated genomic DNA (Homo sapiens)
  unsure 906: n is a or g or c or t
tttgtaagagaggatagtattgtaggattttttttttagtggagtttttttgttatttggattttagaggatatattagggggttttttttttttatttttgatagttttggtttttaggtatatagtttttcggggaggggagatagggataagttgtttttttcgatttttgtaggtgggttaggtttagtgtttggttgtttgatataggaatgtgttatgttttatttttagagggaggtagaggttcggagtggtggttgagtttattttaaattattagcgttttttgtggttagagggttgatgtgggtttttgtgtttggaggtttttcgtaggtttatagtggttttgtttttaatatagtgtagtttttagggaaggtttatttttttttgtggttagtagttagagttttaaggggtttttggaatggttttgcgtatgggagatatattttagttttttaggttttttagtagttttgttttattttttatagcggagtgttgtttgtttttattttttttcgttcggtttttaattggtgggaattggattttgtcgttgtaaatgatttttttatattttgttatattaatagttgattgtatatttgagtttttaggtttttaattttcgttggtgaggtttggttgggaaaatttttaagggttcgggagttgcgtttggcgtttttttttatttcgggatgtagggatgttgggggggagtatggtattcgtattatgtatgttttgggtattttattgggtagaggtgcgacgttgcgtcggagttcggggttcggggtttagaagtcgttttttttagaatgtgttcgagtatttgtttttgtaggggcgggtttgggtattggtgtcggtggggtgagcgttttanggtgatttaaatatcggttttttcgggatgagtttcggtttcgttttttcgggagatgatttgtaatagggatcgtttttttgggtttgagttttagttttcgcgttttgtaatcgttagtttcgggagcgttcgtgttacggtttttgcgtttttattggtcgagttcgttttttttttcgaaggattcgtttttgtttcgtttattagcgggttcgttttcgtgttcggtttcgttcgttttagttttttttagtttgaattttgttcggtgttcgggttgttggaggtggatattttgatttttaggtagtatcggtgtttattttgggtttgaggaggggtagtgtgggtaggggatgggatcgggaggtggagggaaggagagaatggaggggaggtaggggcggggagagaaaagcggaggaatggtggtgaggggttaggggaagaagttaggggaggttgtagagggtgtggtgtagtttggttttgttaaaggtttgtatagagttttagaagagtgattaggagatagttttgggtttttttttatttttttttttagattcggaggttgttaggagtagttgagagtttatttttttttattttattttgtttgttatttttttatttttgtaggggttattagagatgttagtatataggtaaataagttttatgtcgtttttcgtagtaggagtcgttggagtatatatattttacgttgcgtatatttggtttaagttttgtttttggtttgggtattatttttcgtgtttttgattgttattaagtagggagatgtttatttaggatttttgttttattttttttttaggtaagggttgggtataggtttaaatgttaaaattagtgtttttttgttatgtgttaattatcgttttatagagtagaaaattgtaggggtgagattgggtgggacggatatcgtagaggcgagcgagagtcggttaaagttttggtgggtaggggggttagagttaggtggtttaaggtcggttggttaagttattttaagttatcgtgggagtggtttagtagttatttttcgtttagtagtttagatatgttgggtattagaaaataatattttaaaatgaaggttttagaagtagtttcggaagaaaaagtgtttttttgatttttttttgtttttttgttttttagtgttatttttttcgaagttggttttagaaattggaatttattttttttagggtaggttatagaaattagaatttcgtttttttatatagttagatattaaatttaaaaatattgttttaattttttttttatttttgtgtttagaagttggttataaattatttgattttttttgtttgattgtagggtataagattttattttaggagggttttgttttatgtttagaaagaaggaatgttgtttagaaagtttaagaaatttagattaatagttttcgttgcgtttttttttgcggtttaggagtattagtgtaggttttttggtttatttgtgttttcgtatggatgtttatattttgttgagtttaagtattagaaatggtaattttttttatattttttttttttttttttttttttttttgagacggagttttgttttgttatttaggttgaagtgtagtggcgcgatttcggttcgttgtaagtttcgtttttcgggtttacgttatttttttgttttagtttttcgagtagttgggattataggcgttcgttatagttttcgttaatttttttgtatttttagtagagacggagttttatcgtgttagttaggatggtttcgattttttgatttcgtgattcgttttttttcggttttttaaagtgttgggattataggcgtgagttatcgcgtttagtttgttttttttatatttttgggtttttgttttgaaaatttttatttatatacgttaattaatttggggattaaatgttttttgtttaattaatttgttttttgtgaggtggttttttagtaagtttacgggtgtagtgtatcgttcgaggggattttagtttaaagagtgtaaacgtgtttgtatttggagtgcgtgtttttagattttttgttaagttcgtttttaagaatagttattattggtttttttggggatttggggagagtgtagttaagtcgagagtttaggtttagttagagttttttggaaggattgtatagaaaggtcggttgtgtaaggtgggggtgggtgataggagttttagagtgttttagatttgggatttttgggggaggatgggtatttatatgaatttttatttaatggggtaggtgtgagggattgtttttaataggttttagacgttttttgggttttttggggagggtttagaggatgaagcggtaggaggagatgggatgagttattaaattgtttagaggtgtgcgagggaggttgagggttttttggcgttgaggtgtggtggagatgttggaaatttattattgtttttttttaggtgaagtagggttttaggtagttagggaattggttgagtagaggaaatcggagagatttttttttttgttatgaataggtttagtgtgaatgggggaattttttggttttgagggaatgtgggaaaattgttttttaggttgggtgaagaagaaagtaagtggaattttggtatttttggatttttttttttagaggaagcggttttggttgtgggttagcgagtttgtgcgtttttagttttagggtatttatcgttttagagaagtaaggcgatagttttgtcggatgagaggatttaggttgattggaggaaggaagggttttggtttatttgggtttaggtttgggagagatggttttttagaggaggtgatgttttagttagttttaaaggtgagtacggattgtttgggtatgggaagggtattttggttgagagaatagtatagataacggtttagaggtgagtttaggtttggagtgtttaggaagttgagttattggaaggggttgggattaagggtgtatagtggggtgacggggtagaaagtgagtttagagagaggggtgattttgggagcgttgggtagggatatagttagacgtgtattgagaagtattgttttgaatattgtattttggaggttgggatttttgaggggtttttcgaatgagaggaggttagttttagagttgatttttgtatatattattgtttggatatttgaaatggttttgggtttattttaattcgatatatatttattaagtatttattgtgtgtatgttttatgttagttgtttgggacgttagttggtaaagttgatcgttcggtggtagtttgtattattagagtgtatgtgtaggtttcggggaggtatatgatttcgggttattataatgtttaaggaaatgatttattgtttacgagtatttgagttttttttgtgtgtgtagtggacgtcgttgtagggttttgagttttttttgttttttaaggagtttttggttgatgtgttgatgaggggttgaggggaggggtagtgtaggaggtttttgttgtggtttagatgagaggtggtgtggatttggatggggtatggggggatttgaggggtaggtttggaatttttttggaaggaggtttgataggttttttgttggttggggtttgggttgagagggttaattgagggggtttttaggtgcggttgggggcgatatgaggggaggtaattttgtaggtttatttacgggaggggtttgtgggttagtagagagggtagagtgtgtagtgtgtagtttgcggtatgtggtttgagttggacgtgagggtgttattgatatttatgttttgtttagagtttttattttggatgagatgattaggagtggatggggttagagaggagaggggttaagggttaaggttggattttagtatgaggaggaggtgtttagggttttgattagggaaagggagggaaaaataaaggagttgggtttggagagagaggtaggtaagcgagtgaaggtttgggagtttttttggggtcgagagttggagttattggtggttttggtaagagcgttatgagtatgggggttgattttcgggatttaagtaggaggaatgggttggatatttttttgaagggttttgtattaaaagggggttgagaaatgggattgtggttggaggggaagtgggatgaagagagagaatttttgtttataattttaagatttaaaagagtgatgttgtagagaacggaagggtgatgtggagggagcggggagggtttggtttttattatttttttatgattttgtagaggattgaagggtgatttggaaggagcggggagggttttggtttttattattattttatgatgttgtagaggatagaagggtgatttggaaggagcggggagggttttggttttcgttattattttatgggtgaagtgaacgtgttttttttgaggttttgtatttttatttttatgattttttaaggatttgttttaataaagttaataaggttttgtttggggcgggattagagcggaggtagggttggatgtgatttttgttcgttcgaatttcggttttcgtttattttatatttttttagttaggtgaggtgcggttgtagattttggttaatgggggttgtttggattttatagtgggatttgtgtttgatattttgttggggttttgttttagtattttaggttttgtatgtgttgttttgggaattatagttttatgaggggtttttagtttgttgtgggtattgggtgtttggtttcggttttatttgggaggtgttaggttaagagtttgggaggttgggtttaaaggttttttattttttgatttggtatttttgggatttaggggttagtttttagtttaaaggggttaggtttgttaggtagttttgcggggggtttggtggtgtttacgttgtt

SEQ ID NO: 2143 - DNA, 6103 bp, Artificial Sequence
  chemically treated genomic DNA (Homo sapiens)
  unsure 3816, 5993: n is a or g or c or t
agttttgttttgttcgttagtttggagtgtagtggtacgattttggtttattgtagtttttgttttttgagtttaagtgatttttttgcgttttgagttttagcgatttttttgttttagtttttggagtagttgggattataggtgttcgttattatatttagttaatttttgtatttttagtagagacgggattttatcgtgttggttaagatggtttttatgtgttgatttcgttattcgttcgttttagtttttcgaagtgttgggattataggtgtgagttattacgttcgattttttaattttttttttaaatcgttaaattattgatggtatagattggaggttaggatttttaaatattatttaagtagttttttagaaattaagttaattttttttattttgatttttttaggagtggatttttttaatttgaaaattagaatttattgtatttagttttttatgtttttagtagtcgattgaaatagggagaatatagttagtttttggaggaattatttaggtgagttataattatatagttaagattgttgttttaagaaatttttaggaataggattggtaattttttttaaaataatttgggtgttttttagtagttgtaaaggaaattatttttagttattttttttatatatgagtttttttatttatgtattttgataaattttgaagtattagaaattttgaataattatgttaaatttttatgaatgtattagtttataaatttagtttttttaagtaataatgatgaaattattggttatttgtaatttattgttgattatttagggatttattgttttttagtagatttgggtaattaggtagtagttagttattattgatagtttgtttttttttttttgttttgtaggaagattttatgtggttgaggggtaggtagtggataagggaggtgatatgattttaggggtatggttttcggttttttttttttttagttagagtgatttggttttttttttattttttttggtaatttagattattattgggttagtagttagtgtttattatttttgtttataggttaggattttatatttttttttttttttttttgagagagagttttattttgttatttaggttggagtgattttagtttattgtattttttattttttgggtttaagtgattgtattgttttagttttttaagacgttgggattataggcgtatgttgatatattttattaatttttatatttttgtagagatgttttcgatatgtggttaggttggtttttaatttttgagtttaggtgatttgtttgttttagtttagtaaagtgttaggattataggtataagttattatgttcggtttgtgaatttagattttataaattatttttagtgtattgtttaaggttttaaagagtagataatttatttagggttgtatatattagcgtggtgtttgggttttttagtatatatgatttttttaaggttaatattttattagtggggttgttttttgttttggttttttttatataaaggtatggttttttattaagatgtttgaagagggttgttattaaagtatttgaaaataaggaggattttgattaggtcgttaaatattgaaagggatttgggtacgttatgtggatttaaatatatttgtgatatataggatattattgtatttgtttgttttttttgtttttttatagttagagcgtttattatttgtagaatttttattaaagtatttttagtttttagtgtgttttttattttattagatttttgatggttattttggagaaattaatagtttttgtttagaataaagaaaaaattggtgatgggtttagattttttttttttttttttttttaatgaataggattaatattttatatttataaattttgggttttttaggatatttttatatgtaaatttttatataattttggataggtttttttgttatattaagaaggttatttttttagaataatttgattgatttttgttaaaattgtttagtttgagtttggttagataagttgagtagatagttttttttttggtttaagtttaattatgttttttttttttaaaaaaaaaaaatttatttgagatatttgataaaacgagatataaattatgaggttaataaagtaggaaataaaggagaaattagggttaagtataaaagaaatattggttttttttttggtttttttttttttttttgagatagagtttcgttttgttatttaggttggagtgtagtggtgcgatgttggtttattgtaattttttattttttaggtttaaacgatttttttgttttagttttttaagtagttgggattataggtgcgtattatcgtgtttagttaatttttgtatttttagtggagacggggttttattatgttggttaggttggtttcgaatttttgatttcgtgatttatttgttttagttttttaaagtgttgggattatagacgtgagttattgtgtttagttttggttttttttttaaattgttttttattgtagtttttagaatgtagtttattttagttggtagtatattagaaagtaagataaaaatgtaaaataaatttttatttatttttattgattaaaaggggaaggtttggttttaattttggaggtgattattgttattggttagtttaggaggaataagattggtttttttattgtttagtagtattttttttttttgtgtgtttgtatttatgtttatgtttgtatgtttgtgtgttttaagatggggttggggtgggacgtgttgagttttaggtaaatgagtttatgtttggtaaaagggttagtggattaggaacgtgatagttttttgtaagttgtttgttagatcgggaacgttttagtaaatttaaattaataatttttttgattaataattatttttaaaaatttgaaaagtaagaatgaggttaagtttttatatgtaagatttttttgtttttttttttaatagttttttttgttagataatttttttgtcgggtgtggttaagtggggataaagagaagagtaatatttttaatgattagttttatgttttgttttggtgagatgtttggttttttttaatgagttaaatagtttttttttattttgttattgttgtttgttagagattggataaatgatttttttagtgggaatttgaaaataatgaagtaggttaaaaatgaatataatttggaatatgtggattttaagattttttggttttgttttatattgttagttaattgtttattgttaatttagattatagaggaattagaggaatttgtagttgtattttattttgttaattagtgggttaaatatttgatttttaatgtagtatttatttggagtatatagagagtattttgaaggttatagaggagattgttggtgttggtgttttagaattgattaatttttttaaagatgtatttttttttatattttttatattgattaggtaagggagtttttttttttagttttttttttaagatagaattattattaggttgggtacggtggtatatatttgtaattttagtattttgggaggttgaggtaggaggattattttgaggttaggagttttgagatttatttggttaatatagtgaaattttgtttttattaaaaatataaaaattagtcgggcgtggtggtatatgtttgtaattttagttatttaggaggttgaggtaggagaattgtttgantcgggatttgggaggtagaggttgtagtgagttaagattgcgttattgtattttagtttgggttatagagtaagatttcgttttaaaaaaaaaaagttttttgtagagataagatttttttatgttgtttaggtttttatttttattttttaatatagtttatttgtttatttttattgtttgttgtttgtttttttttaggataaggattttgtttttttttttagaggtatttttagtatttataatagtgtttggtatatagtagttgtacgatatatattagttattatagtaaagtttatttgattattttatttaatagaatattttttatgtttaatttgaatttttgattttttttaattaatttttttttttttttttttttttttgtaatagtgtttattatttttaagatattttgtaatatattatatttattatttattgttagtttttttttttatatttagattgtaagttttatgaaagtaagggtttttgtaggtttttttttttttttttttttttttttgagatagagttttattttttatttaggttggagtataagggtataatttgggtttattgtaattttcgtttttagggtttaagcgatttttttgttttagttttttaggtagttgggattataggcgtgcgttatcgtgttcggttaatttttgtatttttagtagtgacggggttttattatattggttaggttagtttcgaatttttgatttcgtgattcgttcgtttcggttttttaaagtattgggattataggagtgatttatcgcgttcggttgtagggttttttatttaggtattattaatatttagggagttgtttggtatatagtaggtaattaatggagtatttgatgagcgtatgatgtatggtgtagtgtcgatggaagtggggttagaaggttttttgtcgttgcggtagaattttcgtgtggtttttttttattagggttttagttttttttcgtagtttcgattttttggtcggcgttggggtggagtcggcggggtcgtcgtgtcgttcgtggtcgttggggacgttggtgttttttcgtttcgtttattttttcgtcggttcgtttttggttagagaagtcgtagttcgtagtgttcgatttagtcgtttcgcgtcggagtcggtttcgtagcgtgttatggtttgttatatttattagttgtttttttgggtgttggacgatttgtgtcgtaatatggacgcgtttagcgagtgggattggatggagttcggtgagtgcggttcggggaggggaggggattagggcgatcggagtttttagcgatttcgtttggagcggtcgttaagttttttcgggtattcgggtttagcgggtttcgattcgagggcgtgcgagttgagttttttggatcgggttcgtcgcggatttcggtttgttatttgaaggtgtcgcgtggtttttgaggacgtttgtcgacgagtaggggtcgtcgttattgcgttttgagtttagagaacggtgggtacgggggttttttttgttagcgttgttggttcggtgacgtttttaggtggttttttatttagtttataatagtttgtagagtgcgagtttcgattttgtagggatttacggtgttgttattttttgggggggtgtgtgtgtgtgtgtgtgtggtgtgtttagttttagtgtatattagaaggatttatgatttaatatatatatatatattgaaacggagtttcgttgttgttgtttaggttggagtgtaatggtacggtttcggtttattgtaatttttatttttgggatttaagcgatttttttgtttcggtttttcgagtagttgggattataggcgttcgttattattttggttaattttttgtatttttagtagagatcgggttttattatgttggttagattggttttgaattatttttttttttttttttttttttttttaagacggagttttattttgtcgtttaggttggagtgtagtggcgcgatttaggttcgttgtaagtttcgtttttcgggtttacgttatttttttgttttagttttttgagtagttgggattataggcgttcgttattacgttcggttaattttgtatttttagtagagacggggttttatcgtgttagntaggatggtttggattttttgattttgtgattcgtttattttgggttttttaaagtgttgggattataggtatgagttatcgcgttcggttttcggaatttttgatttta

SEQ ID NO: 2144 - DNA, 6103 bp, Artificial Sequence
  chemically treated genomic DNA (Homo sapiens)
  unsure 111, 2288: n is a or g or c or t
tgagattaagagtttcggaggtcgggcgcggtggtttatgtttgtaattttagtattttgggaggtttagggtgggcggattataaggttaggagatttagattattttgnttaatacggtgaaatttcgtttttattaagaatataaagttagtcgggcgtggtggcgggcgtttgtagttttagttatttagaaggttgaggtaggagaatggcgtgaattcgggaggcggagtttgtaacgagtttagatcgcgttattgtattttagtttgggcgatagagtgagatttcgttttaaaaaaaaaaaaaaaaaaaaaaaaaaatagtttaagattagtttggttaatatggtgaaattcggtttttattgaaaatataaaaaattagttagggtggtagcgggcgtttgtaattttagttattcgggaggtcgaggtaggaaaatcgtttgaattttagaggtggaggttgtagtgagtcgagatcgtgttattgtattttagtttgggtaataatagcgaaatttcgttttaatatatatatatatgttaaattatagatttttttaatatatattaaaattaaatatattatatatatatatatatatatttttttaagaagtgatagtatcgtgggtttttatagggtcgaggttcgtattttgtaggttgttgtgggttggatgagaggttatttggggacgttatcgagttagtagcgttgatagggagggttttcgtatttatcgttttttggatttagagcgtagtggcggcggtttttgttcgtcgatagacgtttttagagattacgcggtatttttaggtgataggtcgaggttcgcggcggattcggtttaggaggtttagttcgtacgttttcggatcgggattcgttgaattcgggtgttcgagggagtttggcggtcgttttaggcgggatcgttgggggtttcggtcgttttggttttttttttttttcgggtcgtatttatcgaattttatttagttttattcgttgagcgcgtttatgttgcggtataggtcgtttagtatttaggagggtagttggtagatgtagtaggttatggtacgttacggggtcggtttcggcgcgggacgattgggtcggatattgcgggttgcggtttttttagttaggggcggatcggcggggaagtgggcggggcgggagggtattagcgtttttagcggttacgggcggtacgacggtttcgtcggttttattttagcgtcggttagagaatcggaattgcgaggggaaattgaggttttggtgggagaaggttatacgggaattttgtcgtagcggtaggaggttttttgattttatttttatcggtattatattatgtattatgcgtttattaaatattttattaattatttattgtatgttaggtaattttttaggtgttggtaatatttgaataagaaattttatagtcgggcgcggtggattatttttgtaattttagtattttgggaggtcgaggcggacggattacgaggttaggagttcgagattagtttggttaatatggtgaaatttcgttattattaaaaatataaaaattagtcgggtacggtggcgtacgtttgtagttttagttatttgggaggttgaggtagaagaatcgtttgaattttggaggcggaggttgtagtaagtttagattgtgtttttgtattttagtttgggtgaagagtgaggttttgttttaaaaaaaaaaaaaaaaaaaaaaaaaagtttataaaagtttttgtttttataagatttataatttaggtgtggagagaaagattaataataaataataaatatagtatgttatagagtgttttaaaggtaataagtattattgtaaaaaaaaaaaaaaaggaaaaaaagttggttaaagggaattaggaatttagattgagtatggggaatattttattaaatagggtagttaggtagattttattatagtagttaatatgtatcgtgtagttattatgtgttaggtattgttgtaggtgttgggaatatttttgaagagaaggataaaatttttgttttggagggagatagataataagtaataaaaataggtagataagttatgttggagaatgaaagtagaagtttgggtaatataggaagattttatttttataaaaaattttttttttttgagacggagttttgttttgtagtttaggttggagtgtagtggcgtaattttggtttattgtagtttttgttttttaggtttcggnttaagtaatttttttattttagttttttaagtagttgggattataggtatgtgttattacgttcggttaatttttgtatttttagtagggatagggttttattatgttggttaagtgggttttaaaatttttgattttaaggtgatttttttgttttagttttttaaagtgttgggattataggtgtgtgttatcgtgtttagtttgatgatgattttattttaagggaaaaattggaggaaagaatttttttatttggttagtgtagggaatgtggaggaagatgtatttttaggagagttgattagttttgggatattaatattagtaattttttttatggtttttagaatgttttttgtgtgttttaggtagatattgtattgagagttaaatatttgatttattaattaataaagtagaatataattatagatttttttaatttttttatgatttgaattaataataagtagttagttaatagtataaaatagaattagaggattttaagatttatatgttttaaattgtgtttatttttaatttattttattgtttttaaatttttattaaaaaggttatttgtttagtttttgataaataatagtagtaaaatagaaaaaagttatttggtttattggaagaaattaaatattttattagagtagagtatggagttggttattagagatgttgtttttttttttatttttatttggttatattcgatagaggaattgtttggtaagggaagttgttagaaaagaagataaaggaattttatatatgggaatttgattttatttttgttttttaggtttttgaggatgattattgattaaaaggattattagtttagatttattaagacgttttcggtttaataggtaatttataaaaagttgttacgtttttgatttattggtttttttgttagatataaatttatttgtttaaggtttaatacgttttattttaattttattttgaaatatataaatatgtaaatatgaatataaatatagatatatagagaaaaggaatgttgttgggtagtgggaaggttaattttgttttttttgggttggttaatagtagtggttatttttaagattgagattaaattttttttttttaattaatagggataaataaaggtttgttttgtatttttattttgttttttgatgtgttgttaattaggatgagttgtattttaagagttataataaaagatagtttaagaaagaggttagggttgggtatagtggtttacgtttgtaattttagtattttgggaggttgaggtaggtggattacgaggttaggagttcgagattagtttgattaatatggtgaaatttcgtttttattaaaaatataaaaattggttgggtacggtggtgcgtatttgtaattttagttatttgaaaggttgaggtaggagaatcgtttgaatttgggaggtagaggattgtagtgagttaatatcgtattattgtattttagtttgggtgatagaacgagattttgttttaaaaaaaaagaaaaaggttagggaagaggttagtattttttttatatttgattttgattttttttttattttttattttattaattttatgatttatgtttcgttttgttaaatgttttagataaattttttttttttgaaaaggaagaatatgattaaatttaagttaaagagaaaattatttatttagtttgtttaattaaatttagattaagtaattttagtagaaattagttaggttgttttgggaaaatgatttttttggtatagtaagagggtttatttaaggttatgtggggatttatatgtaaaaatgttttgggaagtttaaagtttgtaagtgtgagatattagttttatttattaaaaaaaaaaaaaaaaaaaggatttaggtttattattaattttttttttgttttgagtagaagttgttgatttttttaaaataattattaaaagtttgatgagataaagagtatattggaaattgggaatgttttgatggaaattttgtaagtaatggacgttttggttgtaaggagataagaaaaataaataaatgtaatagtattttatgtgttatagatatatttaaatttatatgacgtgtttaagttttttttagtgtttgacggtttaattagaattttttttatttttaggtgttttagtagtaattttttttaagtattttggtagaaaattatatttttgtatggaaaaagttagggtagaagatagttttattgatggaatgttggttttgaaggggttatgtatgttgagaaatttaagtattacgttaatatgtataattttagataaattatttgttttttaaagttttaggtaatatattgaaaataatttgtaaaatttgggtttataggtcgggtatggtgatttatgtttgtaattttagtattttgttaggttgagataggtagattatttgagtttaggaattagagattagtttggttatatgtcgaaaatatttttataaaaatataaaaattagtagggtgtgttagtatgcgtttgtaattttagcgttttgggaggttgaggtagtataattatttgagtttaggaggtggagggtgtagtgagttgggattattttagtttgggtgataaagtgagatttttttttaaagaaaaaaaaaagaagatataaggttttgatttatagatagggatgataagtattgattgttgatttagtgatggtttaggttattaagggaagtgagagaaagattaagttattttgattgaagggggagggggtcgaaagttatgtttttgagattatgttattttttttgtttattgtttattttttagttatataaggtttttttataagataaggggaaagaaataggttattagtgataattagttgttgtttaattatttaaatttgttgggagatagtaggtttttggataattaatagtagattataaatggttaatgattttattattattatttgaaaaggttgagtttatgggttgatgtatttatgaagatttagtatgattatttaaggtttttaatattttaggatttattagaatatatagatgagaaagtttatatatgaggagagtagttgaaaataattttttttataattattgaaagatatttaggttattttaaagaaagttgttaattttgtttttaggagttttttgggataataattttggttatgtagttatgatttatttgagtagtttttttaaaggttggttgtgttttttttgttttagtcggttattaaggatatggagggttgaatatagtaaattttgatttttaggttgagaaaatttatttttaaggaagttaaggtaagaggggttagtttagtttttggaaaattatttggatagtatttaaggattttggtttttagtttgtattattaatagtttaacggtttgaaaaaagaattgagaggtcgggcgtggtggtttatatttgtaattttagtatttcgggaggttgaggcgggcgaataacgaggttaatatatggagattattttggttaatacggtgaaatttcgtttttattaaaaatataaaaattagttgggtgtggtggcgggtatttgtagttttagttattttagaggttgaggtagaagaatcgttagaatttaagacgtagaagaattatttgagtttaggaggtagaggttgtagtaagttaagatcgtgttattgtattttagattgacggatagagtaagatt

SEQ ID NO: 2145 - DNA, 15518 bp, Artificial Sequence
  chemically treated genomic DNA (Homo sapiens)
agttaggatggtttcgaatttttgatttcgtgatttattcgtttcggtttttaaaagtgttgggattataggcgtgagttttcgcgttcggtttttaatagttgttttaatgtttcgtgtgattattttagtattgggattatttcggagttggtatttattagttatttttttttttataagtttttaaggttttttttgttgttgtttgagtatttttgggttgtattatggatattttgaatattatttaataagattttggattttattaaaattttttggataataatgatttttttgttttgttagtagttagtttggttagggttagattataagtttagatttgttttttgtgggttgtggtttttatgtgagtttagtttttattttttttttttttttttttttttttttttttttttttttttttttttttttttttttttttttttttttttttttttttttttttttttttttttttttttttttttttttgataggattttattttgttatttaggttggagtgtagtggtgtgattttggtttattatagttttggtaacgtagcgagatttagtttttattaaaaaaagaaagaaagaaataatagtaataaaaagaaaatttacggaattgtgtaattattattataatttaattttagagtatttttattttttgaaagatttttttgtttatttgtagttatttttttttagtttttttaaaaaaaaaaaaaagatataaattattttaagaatatagaatagtatggagagtattagtattaatttttaaatagttattttttattttattaaattttaatatgttgtttgatttgtttagaattttttttttttttttagtaaagaaaattttataatagaattttgaagttttttgtttttattttttaggttcgtagttttttttgtttttaggggtaattattgttttgttttaggggtgtgtgggtttgtagggacgaggtgtatgttattttttaatgtttttttttatattttgttttttagaagaattttagtgttacggatttgtgggttacgaggttttagagtagtattttaagggtttttatttattatttcgtagcgtgagtgtggtattatggatgtatgtgatttaggttatatttgggtttattttttaggagtgttgtttttttttttttatgttattttttggatagtatttaattttatttaattgtgttcgtgaatttggtttttttatggtttttgtgttttagaatatgtggttattttttttgtggtttagtaattatgtgtttattattgttttattttgtaatataattgtgtttaagttggagacgaatggttacgttttttaaattttttatttgttaaatttgtatttttatttgatttttttttgtttgtttgttgttgtttttgtttttgagtaagagttttttttttattatttaggttggaatgtagtggtataatttcggtttattgtaatttttgttttttaggtttgagtgatttttttgttttagttttttaagtagttgggattataggtatgcgttattatgtttagttaatttttgtatttttagtagagatagggttttgttatgttggttaggttggttttgaatttttaattttaggtgattcgtttatattagttttttaaagtgttgggattgtaggtgtgagttatcgcgattggtttgatgtgtttatttttgagagagatttgttagagatatttgttgtttggggttgtgttagtttgtttatatatttgttagtttttgttttatatattttgaagttcggtatataaaggattatggttgttgaattgtttgtggattttgatttttattggttatatttttttttgtttatttgatgtattttgttttgatttttatttttttgatgttatacgatattttcgttagtattttttagtatatacgtgtatttttcgtttttttatttttagtttttagtgtttttttttaatagtttatttgatagagagttttttttatattttttattttttaattgtgataaaatatatataatataaatttattattttaattatttgaagttatgtattttcgtggtattaaggatatttagtattgtgtaattattattattaatttttttaaaattattttattttgtaaaacgggaattttatattcgcgaaataataattttatatttttttgaaatgtttttttaattttattataaaaaattttatatatttatagaagtagagagaatagattagtgaagttttatgtttttaatagtggttttaaaaataattaatttataggtgattttgttgtattaatatttttttcgatttttttttaatttaatttatttttttttattgggaaataaatttgaaatattatattgtattatttgtaaatattttaatatgtaattttaaaagatggggattttttaatataattataaattattgttatatttaaaataattaataatgattttaaaatatggtttatgtattgtaattggttttattaagagattaaattttttaatttaaagggttttttttttttcgtttttttttttgtattgtgttgtttgttttgtgagggtttttttagtttggattttgttaattgtatttttacgatgttatttaatatatttttttgatgtttttttgtagatttaaaaagttcgatttgatttaggtttaatagtaatatttgttttttttattttttttgatttttattgttattttattaagattaatttattaaaggtgtgtgtataacgtttgttgcgttcgtgacgttcgtagcgagggttattgtttattttaagttattagcgggtgtagtagaatggtattttttttttgtttttttttattattttttaggttaagtttgtaatgagaagatatttttgatagagaatattttattggaatttgttttgtttttttatttttaaaatttaacgtaagattttgttgatttaaaataagaaaatgtaatttatttataggtgttgtgatttttgatgggtttgaaattatttttaatgttttattgtttggtttttatttattttttttgtttgttttatttttttttattttttttttttaaaggatttgttttttttttttttttttttttttagttatttagattggagtgtagtggtgtaagtatggtttatcgtagttttaattttttgggtttaagtaatttttttattttagttttttaagtagtttggattatatcgcgtgttattatgtttggcgaatttttagaaaatttttttgtagagatgagggtttgggtttttaaatgttgtttaggttggtttcgaatttttgggtttaagtgatttttttatttcggttttttaaagtgttgggattataagtttgagttattatgtttaaaataaagatttgttatatttttttttaggtatatatatgttatttttatttttaaggagatttttgaattgttagtatatatatttagatattttttattaaaatgtttattgataagtatttatatttttttttagataggatggaacggtaatgtgttttttggttttttttaatttagttttttaggcgttttgttttatagcgttaatatttttattattattttttaaattaataggttatgatattataatttttatttatttttttgtttaattttgtattatttgtttttgtattttttatggatttttttatgtttatttttgtaagatatttttaaaatagagtttaggagtcgggagttatggtttacgttagtaattttagtattttggaaggtagaggtggatggattatttgaagttaggagtttaagattagtttggttaatatagtgaaattttgtttttattaagaatataaaaattatttaggcgtggtggtatatgtgtttgtaattttagttatttgggaggttgaggtaggagaattgtttgaattcgggaggtagaggttgtagtgagttgagattacgttattgtattttagtttgggtgataaaagtaaaattttgttttaaaaaaaattgaaaatataaaaataaataaataaataaaatagagtttagggtagtaatgtgtttgagtttttgttttgaagatgtttgatttgggttttttttttaggtataatttttttttttttttttttttttttttttttttttttttttttttttttttgagtttgtagtattttttttttcgtgttttgtggtatttttttaatgtttttagttaataggattttatttatttatttttggggtgtttagtggtttcgtaatttacgttttcgtttagattcgtagttttttttttgtgatttgagtgtttttttttcgttgtttttgttttgttttttttcgtttttatatgtaggtggatgttaatgcgtgtacgtatttaggtttttttgtttgtttttatttttttattttttttggttggttttttcgttttattttttggtttaggaatttgttttttagggttttttatttcgttttgtagtagaatgtgttattgttgttttttagtattaaattttttatttttatggtttttgtgtttttttttttaatgggtgttttttttgtttggcgtttttggaggtcgggttttttttttaagtgtgaatttgatggaagtaggtttttttcgtcgggattttatgtgagaaatgatatgttttatttgttttaaggggtcgttttttgatattagagttgttgtagagcggagaggggtaggggtgaagggttacggtggtgtaatttattattttttttaaggaggagttgagaggaataggaagtgttaggattttacgattcgcgtttttagttgaggtttttagacgtgatttagggtagattggtagtaaagtttttacgtttagttaggagtatcgtcgaggattttagtatatcgagggtgagtgtgtagaggtttcgttatgtttacggtgatttttggagggaagtatttttttgttttagtttggagtgattttggtggttttgtttatagtttcggtttaggggtgtttggtaggaaggggtttttagatcgtttgttttagggttttttttgagattcggtaaggggaagtgtttgttattaagagtagagttatatggtgtgttgggagcgtttgcggttgaggatggggtcggtatgggaggataaggggttgtgaggtcggtaaggttaggaagaggttgggtttataagtttttagggggacggttggggggttttggtgtttcgggttgggtaggaggtaggttttcggggttttttttgtgaatttgttgcgtttgtttgtgttaggtttttttgtttgtatgttgtttcgtttggttatagcgattttatttttagatcgattcgtagtgtgtggtgtgtgatatggtgtggtgtggttcgtggtgtgtagtgtcgtgtgtgtagtgtggtatggtgtgtatgtatggtgtacgtgtgtggtatagcgtagtgtggtgtgtgtgtgtgtatgtatggtgtgcgagtgtgcgtatgtgatgtggggagtttgttgtatgtatatgtatggtgtatatgtgtaatgtagtgtggtgtggtgtggtatatgttttatgtttttttgggattttcgagtttttttgtttttttcgtggggatttttgggtgacgttttgttgtaggggagcgggtatcgttgtgcgattttggtcgagttggtttagttggtgattttggtttttttataataggtttttggaggttatttttaaggttttggtgggagggggattgaagttacgtttttgggttttaggtttatttggttttttttttttaatattgtatttttggggttagttttttttatgtattttttatttttggtattattttttgtattatcgtttttatatttaatttttttttttttggatttgggagttgggattttgttttgttgtttttgtttattcggggttttttttttttgttagtttttgggtggggagaaggaggggtggtatggttgtaatggggaaggggggggatggtcggagagtttagtttgggagcgagttgtgggggtataggggatattcgttgttattcgtttttttcgtgacggtggcgtaacgtttgcgggtttgggggttgaggtcggattttggaggttttatagaaatgagttgttagaagttttgggttgtttgtcgttattttagcgttttattatgagtgaagtttagtttattgtagaatttatgtttagtttattgtagaattttcgggggttagtattttattaagagtggtttttagattttatattttaggaaggaattttttttttatttagtttatagtagaatttttagggtttttgttagtttggtatttagcgtgttttttagtattttggggatgagtgggggagtttttttgttgggaagaggtttttggttacgtttttgtagggcggcggttgagtttatgtttcggttttagggttagttttcgtcgggtgttattttgagtagggttatagaatagatgttttatatggttaggatttttgtggttatttgatttcgggggggttgtggttttcggtgaagtaggtgatcgggcgggttgtggggtttgttagtttcgtagcgttattgtcgtttagcgtatgagtttttatttttagtatttaatgaatagttgagtaattgtaggtgttttcgagtgttgggagaggggaatgtttagtttcgagtgttgggagaggggacgtttagtttcgagtgttgggagaggggacgtttagttatttaagggtttttgttttaagggagtaaataggggtattttttggtgggcgtgggttgggttggagaagtagggttttttggtaggggttggtatgagatttaaatattgtttaggtagttggatatttttgagtttggagttttttatttgaattatagggtggtaatttttgttttttaggcggtatcgacgtgatttgtttagtgtatagtgagtttgaggtaatacggttattattaggagattttttggggaagaggtttttagatagcgaggtgtttatgaaggaagttttgtataggggtcgcggttatttaggagatgggaggggttttatttgtattttgtttggaaggggtatggggtgagtaggttatttggtttttcgtgatttagtttttttatttgtgaaataggaggggtggtttggttaattgtgcgtattttagttgtttttatagttaatcgtgtaatttgaatttatttttttagggtttttgttaggtttaggtttgtttattttggtttaggtcgggttttattaggtattagggttgtgggatatttgtttttgtggatggggtagcgtgacgtttgtggcgattttatggaataggttttgtgtgggttttttttgttgtattcgtgttttgtgttagagaatcgtggttttgtttgaggttatgttatcggaggttggttttcgttttcggaggagaatgttagttgttataggggttagtgatataggtatttgtttagtaggtataggttaggtcgttgggaagttttaatttaaggggttttgtagtgggcgtttagtaattatggagttgtgggtgatatttattttaagtcggatttggtgttagtaattattttttttattttgtttggtataaattggtattgatacggggtattgattaggtggttgtatttgtcgatttcgagtttatgtgtgtggagtttaggttttgagtaagtatagagggttttggtgttgttttgagttgaggtttttgtttatttcgggttgcgtgtttttttcggttatttagggtttgagagtgtagaagagttagttttaggggaatatttttttgtttagttgatttgtaaatagtttcgttggggatatatgttggtgttgggagtggtggaggtttttgtgtgtgatggaaatttggggtaggtgttggggaaaagaggtgttgagagttttagtagagggtagagtttaggagttttggagtgtagtttttagtttttgcgtcgtgtttagaggagaggttggtaagtttttgttttatggatgggtgaatgggtgagtgatagtggtaataagtttatgttagtagggaggttttattgttatgaagtagcgtttttattaacgttatagtgggaataagaaagttagtagttttggaattcgaaggagtaattttagtataattcgtcggttattatgaaattttatttttaaaatgttttttatttatttattataaaaagggtggaaaatataaataggaataatgaaaattgaaaatatttatagtgttattatttagagaaatgtagaatattttggaattgtgtttttttttttttttttataaatttatttttattacgaagttaagttgttttgagtagttgtttgtatgttttcgttgttgtgtgggattttatagcgtaggtatcgaaatcgttaaagtattttatacgttgacggttatatagggaattaagatattttggttgaaatttttggtttttttttggggtgatttatatgttttttagttagttttttttttttttttgtgaattatttgtttagggtgttatatttttgaaatatttttgaatggagtatttatttttttgttattaatttttaagatttttttagagatgaagattattatttattttttgtattagagagataatagttattttttttatgtaatttgttagtataatatgtgttatttttagagtttgtttttttgttatttttttttttagtttttttttttttttttttttgagatagttttatttttgttgtttaggttggagtgtagaggtgagattttagtttattgtattttttgtttttcgggtttaagtgatttttttgttttagtttcgcgagtagttgggattataggcgttcgttattaagtttagttaatttatgtatttttagtagagatggggttttattatgttgtttaggttggttttaaatttttgattttaggtgattcgtttgttttagttttttaaagtgttgggattataggtatgagttattatgttcggtttttttttagtttttatgttgaggtttttttatttttagatatttatttttttattttttttattgttttattttttaaaattgaagttttatatatttgtggttatttttttatgtttatagtaagagtgttcggggtttcggttttacgtcgttatttaggaatagatagttttttttatgttagatggaggagtggtgtttttttgtttaaaatgttgtaaatattatttgatttttttttgattttaggtatttagtagagtattttagtattttttattaatatgtgtgtgtcgggggggtggggtgttttattttattttatttggttagaaattgtggtttttaaaatttgtgttattaggtcgggcgtagtggtttacgtttgtaattttagtattttgggaggtcgaggtaggcggattacgaggttaggagttcgagattagtttggttaatatggtgaaattttatttttattaaaaatataaaaattagttgggtttagtggtgtgtatttatagttttagttatttaggaggttgaggtagaagaattttttgaatatgggaggcggaggttgtagtgagtcgagatttagttattgtattttagtttggatgatagagtgagattttattttaaaaaaataaataaataaataaaattgtgttattaaattttatagatagttaaattaatagtaggaatacgtttttttgatttttgggaaaatacgtttttgtagggtcgtaggtttagaggcgatatgggttgggtttttttgtattttttttgtttcgatttgtttttatttgatttgatttgtttttgtttttggattttttggagtttttgtgatttaaggatagtgttttagtttttatttgacggtatttttttttagttttttattatatttttataaagtagaaatgagtttattttgatgttttggtttttggtttaaaaggtggatgtttagtttataattattttttgagtttttagtttttagcgtaggggttggtttttatgtttttttttttttaattttgttttttggcggtatcgtttattatttttcgcgtattttcgagttattttgatgcgagtgttttttttttaggatagcgtaaggtgggttttagtataggtaggaggaagttttgatgtaaagttttaatgggtttgcggggtttttggttttttaagtagtttcgttttagggttttacggggttgtaaaaaggaagtttgagattgggtacggtggtttacgtttgtaattttagtattttgggaggtcgaggtgggcggattatgaggttaggagatcgagattattttgattaatacgatgaaatttcgtttttattaaaaatataaaaaaattagttgggcgtggtcgtgggagtttgtagttttagttatttaggaagttgaggtaggagaatggtatgaatttgggaggcggagtttgtagtgagttgagatcgcgttattgtattttaggtcggtgatagcgtaatttcgttttaaaaaaataaaaaggaagtttgatttcgttggattttttttttagtataggttttgttttttttttgttgttttgtttaaagttttttttttttttttttttttttttttttgagatagggtttcgttttgttaattaggttggagtttagtagtgttattagggtttattgtagttttttttttttgggcgcgagtgatttttttgttttagttttttgagtaattgggattagagatgtatgttattatgtttggttaatttattttttatttttattttttgtagaggtaggagttttattgtgttgtttaggttgtttttaaatttttggttttaagtgatttttttgttttggttttttaaaatattgggattgtaggcgttagttattaggttggttttttttttttttgtgtttgtttttgtttttttgttttcgatttttgtgaaagggtgtgtgtgatttggttcggatttgttgtaggttttttttgacgtcgttttcgtgttttagagtttgaatgtttagagttttgtttatcgtgaagtgtggtttttgttagttgtgtttatttggtgttcgggagggaagggcgttcggtttttgaggggtttttcggggaaggatgatttcgtttttttggttttgtttttttagttttttgttttttttgtgtaggggatttggtgataggtattattttttgtagttgggttggggttgtattagtatttttttttcgggtagggttgaggttaagggcgattttgatgtaaggttttgagaggtttgtggggttgtggatttttaagtagttttagttttgggttttgtattttaggttttggtaaggggattcgttcgtttttagatgggggatgtttagagttggaggatgaggagggtattcgtttttggtgtggggtagtagggagggttttggagaatgaggagggtatttgtttttagtgtggggtagtagggagggttttagggtgattaggttttaggttagagttttggggttagtttaggggttggggtggggggtgtttgtgttttttttttttttttgttttgtagttttgtcggtttagttttagggtattagaggtgatagtggttaggtatttgtttgttcgaatgttgttttatatttgtgttttatttatttttattttttagggagttggtataggtttttcgattatttttaggtatatggaggaaattgaggtagataggtttgatggggttttggttttttaggttttaggtgaggttttggattttcgtgggttattttggttgttgggtagaggggttgttttgttttgtttttttatagaagggaggttggttgttaggtttagtgtattgttttattttttggagcggatttttatttttagttgtttgtttgggtttagttattggtattggggggtggggtagggtttggttttttttgtgtttttagttttaagttttttagggttgtttatggaggagtaatagtggggagaaggtggttttttattagttttttttttgtggttaaggttggggtgtcgtggtttttgagttaattttgttggaattaaggtgtattttttttttttgtgggtaggtgggagtgttcggggtaattgggtattaggtttatattttgttgttgttggggtttttagtttttttatttgagggtatgaagtgtttgtatgttattggttacgattgtgttaggggcggagattttatgtttgcggttttagggagagcgtggagttggggtgtgagtttttattagtttggttggggttgttaggggaggtttgtattttttttttatttggcgtagttgcgatttgggggagttttgaagtcggttggattttgtattttgggggagttttgaagtcggttggattttgtattttgggggagttttgaagtcggttggattttgtattttgggggagttttgaagtcggttggattttgtattttgggggagttttgaagtcggttggattttgtattttgggggagttttgaagtcggttggattttgtattttgggggagttttgaagtcggttggattttgtattttgggggagttttgaagtcggttggattttgtattttgggggagttttgaagtcggttggattttgtattttgggggagttttgaagtcggttggattttgtattttgggggagttttgaagttggttggattttgtattttggggtagttttagtacgtatagggttttcgattagttgaggggttggtgggtattcgtggtatcgaggttagtttaggcgtaggattttgagggggtttagatggagagttggaattggtttcggtttgaattataatttttaacgattagagatatgggggtttttagatatagggtgggtttaatgtgaattaaaattattttttttaggaagttatagtagggtgtaggttttgtttttgattttaggacgggaaggattaagggtttttttttgatatttttgtattttgattataattttgttgggaattagggaatgaggttattgttaaaataataggattttggggtttgttggggcgtttaagttgtgggatttttagatgggtttttggtgggtgtttcgttggttttagagtttttagtataggtgtagggttttcgggggatggaggggagttagggtttgtggttgagggtattcgagtttttcgggttatagtatagtatttagcgttgtttttaaagtcggtaggttttagtttggggttttgttggtttgggtttgtttattgaattttgggtggttttgttagtattattcgagggaagggtgtggggtaggaacgttttagtagtttgggaggtcgtgataggaattggtatttgttggaggaggtgtgttgatttttgtttttgataatagttttagggtaacggaaatgtttttttgtttattatgataggaaggtttttgggtatttttttttagtatttttttatttttttggtgttagataaaagggttttagttagttataatgtttttaggttttgggaggttagatttaggggtttattttatttaggaagttttaagattttttaaggagtcgatttaggtttggtttgggtatttttcggatggagggaagggaatttaggggtggaacggttttgttgttcgttaggaggtgttgtcggtttttagtattaggttgaggtttgttttcgttattttgtttttggggtcgagggtttgtgagtgattattgagtcgtttttggttgtggatgcgtgggttaaggacggggtgggtgtgtatttggaaataaaagggtaggatttcggtaattggtggtttgggtaagttaggtgatttttttttttatttggtagggattgtagggtttttgggtaggtttagtatatagtttggtattcgcgggtattaagttagttttttttttttggtatatagtttggtattcgcgggtatttagttagttttttttttttggttatgtttttgttatagagagatagggttaagtttagtttttttttaagtataggttttgtttacggaggatttggggtatattggggtagagtgtatatatcgggtgtgtggggttttggtgtttgtgtgcgtgtatatttgtacgtgtgtatggtgtgtgcgtgtggtgtgtgtgtttgtgtggtgtgtatgtgtgtgtacgtgtgtatgtgtatatttgtgtgtggtgtgtagtgttttgcggggagtatggtgtgggtaaggggtgtatatatttttgtgtgtatatatgtgtggtgtgatgtatgtatatgtgtggtgtgtgtatgtacgtggtgtgtatatgtagttaggtatatatttgtatgtacgtatacgtgtatgtgtggtgtgtgtatacgtttgtatgtgtgtgtgtgtttgtgttgtgtgtttttgtaggggttcgttgtagttgttttgggtgtttggttgagtaggtgtgttgttcgtattgttgagttcgggatttttttttttttggttgttggtagttgggtttagtgtagttgtgttggtttgattttaatttattttttgtagtagggatagggttttagttttttgttttaggttagttggaggggagttttatgggtggttagttttaggggttgggtttgagatcgttattaagattttttttttttataggatatgttgggtttgcgttttttattgttcgttttggtggggttgttttttttcgggtgcggtgagttttgtgttttacggaggggattttacgcgtgatattttaattagggagaatagggtttgtttttatttttttatagatagaagttttcgggaggttggggaaggattttgttattgggggtaggtcggggatttaggtttcgttttcgtacgtgttaggaggttgtagttgtgttgtttttcgagggtttttttttgtatttgggggtggtggcgaatgcggggtttttttttggaggttgtttttttgtttttttgggttttttttgatttttttgttttatttttttttgggtgtgggtagggcggtttagagtatttatttattagtcggtttcgttttttagt

SEQ ID NO: 2146 - DNA, 15518 bp, Artificial Sequence
  chemically treated genomic DNA (Homo sapiens)
attgagggacgaggtcggttggtgagtgggtgttttgggtcgttttgtttatatttaagggggagtagagtaggaaggttagaggaggtttaaaaagatagggaggtagtttttaggaggagatttcgtattcgttattatttttaggtgtaaagaggggttttcgggaaatagtatagttatagttttttggtacgtgcggagacgaggtttgagttttcgatttatttttagtggtaaggtttttttttagtttttcgggaatttttgtttatgggaaagtgagggtaggttttgttttttttgattggaatgttacgcgtggagtttttttcgtggaatatagaatttatcgtattcgagggagagtagttttattagggcgagtagtggggggcgtaggtttagtatgttttgtggagggaaggggttttggtgacggttttaggtttaatttttggggttgattatttatgaagtttttttttagttggtttgggataaggagttggggttttgtttttgttgtagggggtgggttagggttaggttagtatagttgtattgggtttagttgttaatagttagggagggagggatttcgggtttagtagtgcgggtagtatatttgtttagttaggtatttaggatagttgtagcgggtttttgtagaggtatataatataggtatatatatatatgtagacgtgtatatatattatatatgtacgtgtacgtgtatatagatgtgtgtttgattgtatgtatatattacgtgtatgtatatattatatatatatatgtattatattatatatatgtatatatagagatgtatatattttttatttatattatatttttcgtaagatattatatattatatataaatatatatatgtatacgtatatatatatatatattatatagatatatatattatacgtatatattatatatacgtgtaaatgtatacgtatataaatattagaattttatatattcggtgtgtgtattttgttttagtgtgttttaggtttttcgtgagtagagtttgtgtttggaggagagttgggtttggttttgtttttttgtggtagaaatatagttaggaagagaaagttggttggatgttcgcgggtgttaggttgtgtgttaggaagagaaagttggtttgatgttcgcgggtgttaagttgtgtgttaggtttgtttaggagttttgtagtttttgttaggtgggaaaaaaagttatttgatttgtttaagttattagttgtcggggttttgtttttttgtttttagatatatatttatttcgtttttaatttacgtatttatagttaggggcggtttagtggttatttataggttttcggttttagaggtaaaatgacggaagtaggttttagtttggtgttggaggtcggtagtattttttagcgggtagtagggtcgttttatttttgggtttttttttttttattcgggaggtgtttaaattaggtttaggtcggttttttggggggttttagggttttttaggtggggtgggtttttgggtttgattttttaggatttgagaatattatagttggttgggatttttttatttggtattaagaaggtggagaggtattgagaaggggtatttaggagtttttttgttatggtgggtaggaagatattttcgttattttggggttgttgttagaagtaaagattaatatattttttttagtaaatgttagtttttgttacggttttttaggttgttggggcgtttttgttttatatttttttttcgggtggtgttggtagggttatttaaggtttagtgggtagatttaagttagtagagttttaaattagggtttgtcggttttgaagatagcgttgggtgttgtgttgtggttcgggaggttcgggtgtttttagttataggttttggtttttttttatttttcgaaagttttgtatttgtgttgggggttttgaggttaacggaatatttattaggggtttatttgaggattttatagtttagacgttttaataagttttaaggttttgttgttttggtagtgattttattttttggtttttagtaaaattataattagaatataaaaatgttaaaagggaatttttgatttttttcgttttggggttaaaaatagaatttgtattttgttgtaattttttggaggaggtggttttggtttatattgggtttattttgtgtttgaaagtttttatatttttgatcgttgggggttgtggtttaggtcgaggttagttttagttttttatttgggtttttttaaagttttgcgtttggattgatttcggtgttacgagtgtttattagttttttagttgatcggaggttttgtgcgtgttggagttattttagggtgtagggtttagttagttttaggatttttttagggtgtagggtttagtcggttttaggatttttttagggtgtagggtttagtcggttttaggatttttttagggtgtagggtttagtcggttttaggatttttttagggtgtagggtttagtcggttttaggatttttttagggtgtagggtttagtcggttttaggatttttttagggtgtagggtttagtcggttttaggatttttttagggtgtagggtttagtcggttttaggatttttttagggtgtagggtttagtcggttttaggatttttttagggtgtagggtttagtcggttttaggatttttttagggtgtagggtttagtcggttttaggatttttttaggtcgtagttgcgttaagtggggagggggtgtagattttttttggtagttttagttaggttggtaaggatttatattttagttttacgttttttttggggtcgtagatatgaggttttcgtttttaatatagtcgtgattagtggtatgtaaatattttatatttttaaatggggaaattgagggttttagtagtagtaagatatggatttggtgtttagttatttcgggtatttttatttgtttatagggagagggggtgtattttgattttagtaggattggtttagagattacggtattttaattttgattataggaagggggttggtggggagttattttttttttattgttgtttttttatgagtagttttggggggtttggagttgggggtataagagaagttaggttttgttttattttttaatgttagtggttgagtttagataaatagttggggatgaaggttcgttttaggaggtaaggtagtgtattgagtttggtagttagttttttttttgtgggagaatagggtagggtagtttttttgtttagtagttaggatggtttacggaggtttagggttttatttgaggtttgagagattaagattttattaggtttatttgttttagttttttttatgtgtttggaggtggtcgaagggtttgtgttagttttttgggggatgggaatgggtaaggtatagatgtagggtagtattcgggtaaataggtgtttggttattgttatttttggtgttttgaggttaagtcggtagagttgtagggtaggaggggaggaagagtatagatattttttattttagtttttgagttggttttagagttttggtttggagtttgattattttgaggttttttttgttgttttatattgggggtaggtgttttttttattttttaaggttttttttgttgttttatattaggggcgggtgttttttttattttttagttttggatattttttatttaagggcgggcgggtttttttattaagatttaaggtgtaaaatttaaagttgaggttgtttaggaatttatagttttataggttttttagaattttgtattagagtcgtttttgattttaattttgttcgagaaggaagtgttggtgtaattttagtttagttgtaggaagtggtatttgttattaagttttttgtataggggaagtagggggttgagggggtaggattagggggacgaggttattttttttcggagaattttttaggggtcgggcgtttttttttttcgggtattaaatggatatagttaataagaattatattttacggtgagtaaagttttgaatatttaggttttgagatacgaaagcggcgttagaagagatttgtagtagattcgggttaaattatatatatttttttatagaagtcgaggataggagaataggagtaaatataggaaaggaagaggttagtttggtggttgacgtttgtaattttagtgttttgagaggttaaggtaggagaattatttgaggttaggagtttgagagtagtttgggtaatatagtgagatttttatttttataaaaaataaaaatagaaaataaattagttagatatggtggtatgtatttttagttttagttatttaggaggttgaggtaggaggattattcgcgtttaggagggagagattgtagtgaattttaatggtattgttgaattttagtttagttgatagaacgaggttttgttttaaaaaaaaaagaaaagaaaaagaaaggaaattttaagtaagatagtagagagagggtagagtttatgttgggagaggaatttagcggggttaggttttttttttatttttttgagacggagttgcgttgttatcggtttggagtgtagtggcgcgattttagtttattgtaagtttcgttttttaggtttatgttatttttttgttttagttttttgagtagttgggattataggtttttacgattacgtttagttaatttttttgtgtttttagtagagacgaggttttatcgtgttgattaggatggtttcgattttttgattttatgattcgtttatttcggttttttaaagtgttgggattataggcgtgagttatcgtgtttagttttaggttttttttttgtaatttcgtaaaattttaagacgagattgtttgaggaattagaggtttcgtagatttattggaattttgtattagagtttttttttgtttgtgttgaaatttattttgcgttgttttagaggagaggtattcgtattaaagtgattcggaggtgcgcgggaagtgatggacgatgtcgttaggggataaggttggaaggaagaggatatgggagttaatttttgcgttgggaattgaaggtttaagggatgattataaattaggtatttattttttaagttaaaagttagagtattaagatggatttatttttgttttgtaggaatgtgataaagaattggagagaagtgtcgttaggtggggattggaatattgtttttggattatagaggttttaggaaatttagggataaaaataggttagattaaataggaataagtcggagtagagaggatgtaggaaaatttagtttatgtcgtttttgaatttgcgattttgtaaaagcgtatttttttaagggttagggagacgtgtttttattgttggtttgattatttgtgaagtttgatagtatagttttgtttgtttgtttgtttttttgagatggagttttattttgttatttaggttggagtgtaatggttagatttcggtttattgtaattttcgttttttatgtttaagaaatttttttgttttagttttttgagtagttgggattataggtgtatattattaggtttagttaatttttgtatttttagtagagatggagttttattatattggttaggttggtttcgaatttttgatttcgtgattcgtttgtttcggttttttaaagtgttgggattataggcgtgagttattgcgttcggtttgatagtataaattttaaaggttataatttttggttaaatgaaataaaatgagatattttattttttcgatatatatatattaataaggaatgttaaagtattttgttaaatatttgaagttaaagggaaattaaatgatatttatagtattttagataaggggatattatttttttatttaatatgaaggagattgtttgtttttgggtggcgacgtgaggtcgaggtttcggatatttttgttgtggatataaaagaatggttataaatgtgtaggattttagttttagggaataaaataataaaggaaatagaagaataggtatttaagagtaaggaaattttagtataaaagttaaggggaggtcgggtatggtggtttatgtttgtaattttagtattttgggaggttgaggtaggcggattatttgaggttaggagtttgagattagtttgagtaatatagtgaaattttatttttattaaaaatatataaattagttgggtttggtggcgggcgtttgtaattttagttattcgcgaggttgaggtaggagaattatttgagttcgggaggtagagggtgtagtgagttgagattttatttttgtattttagtttgggtaataagagtgaaattgttttaaaagaaaaaaaaaaaaaaagttaagggggaaaatagtaagaagatagattttaaaaatggtatatgttgtattaataaattgtatagaggaaatagttattatttttttagtgtaaaaggtaaatggtaatttttatttttaaagagattttagaaattaataataaaaaggtaaatattttatttaaggatgttttaagggtgtggtattttgagtaggtaatttataaaagaaggaagaaaattggttaagaaatatatgagttattttaggaaagaattagggattttagttaaaatattttgattttttgtgtagtcgttaacgtgtaagatgttttggcggtttcggtgtttgcgttatggagttttatatagtaacgaaaatatgtaaatagttgtttagggtagtttggtttcgtggtaaaagtgaatttatggggaaaaaaagagagatatagttttaaaatattttgtatttttttgggtggtggtattatgagtatttttaatttttattatttttgtttgtattttttattttttttgtgataaatgaataaaggatattttaaaaatggaattttatggtggtcgacgaattatgttgaaattgttttttcggattttaaagttattggtttttttgtttttattgtgacgttgatgaggacgttgttttatggtagtgggatttttttgttggtatgggtttgttgttattgttatttatttatttatttatttatgggataggggtttgttagttttttttttaggtacggcgtaggggttgagagttgtattttaggatttttggattttgttttttgttgagatttttagtattttttttttttaatatttattttaagtttttattatatatagaaatttttattatttttaatattaatatgtgtttttagcgaggttgtttataaattagttgggtaggaaggtgtttttttggggttaatttttttgtatttttagattttgaatggtcggagagaatacgtagttcggggtgggtaggggttttagtttaggatagtattagggttttttgtgtttgtttagggtttgggttttatatatatgggttcggaatcgataaatgtaattatttaattaatgtttcgtgttagtgttagtttgtgttaagtagaatgggagggataattgttggtattaggttcggtttggggtgggtattatttatagttttataattgttaggcgtttattgtagagttttttgagttggggttttttagcgatttggtttgtatttgttgggtaaatgtttgtgttattgatttttgtggtagttggtattttttttcgggaacgggagttagttttcggtgatatggttttaggtaggattacggttttttgatataggatacgagtgtagtaaggggggtttatataggatttgttttatggaatcgttataggcgttacgttgttttatttatagaggtaaatgttttatagttttggtatttggtggggttcggtttgggttagagtggatagatttgggtttggtaggagttttggggaagtgagtttaagttatacggttgattatagagatagttggagtgcgtataattggttagattattttttttgttttatagatggggaaattgagttacgggggattaaatagtttgtttattttatgttttttttagatagggtgtagatagggttttttttattttttggatggtcgcggtttttgtgtagaattttttttatgggtatttcgttgtttgggggttttttttttagggagttttttggtggtggtcgtgttgttttaggtttattgtgtattaggtaggttacgtcgatgtcgtttgaggggtaggggttattattttgtggtttaggtgagaagttttaggtttaggagtgtttagttgtttgggtagtgtttggattttatgttagtttttgttaggaggttttgtttttttagtttagtttacgtttattaggaaatgtttttatttatttttttgaggtaaaggtttttgggtggttaagcgtttttttttttagtattcggagttgagcgtttttttttttagtattcggagttgagtattttttttttttagtattcggaggtatttgtagttgtttagttgtttattgagtgttgggagtggaaatttatacgttgagcggtagtgacgttgcggagttgataaattttatagttcgttcggttatttgttttatcgagggttatagttttttcggggttaggtggttataggggttttggttatgtgggatatttgttttgtggttttgtttaggatggtattcggcggggattggttttggggtcgaggtatgggtttagtcgtcgttttgtagggacgtagttagggatttttttttagtagagggatttttttatttatttttagaatattgaggggtacgttgggtgttaggttggtagggattttggggattttgttgtgagttggatggggaaggagtttttttttaaaatgtggagtttggaggttatttttggtaaagtgttggttttcggggattttgtagtgagttgggtatggattttgtagtgagttgggttttatttatggtgaaacgttggggtgacggtagatagtttagagtttttagtagtttatttttgtgaagtttttagaattcggttttagtttttaaattcgtaggcgttgcgttatcgttacggggaaggcgagtgatagcgagtgttttttatgtttttatagttcgtttttaggttgagtttttcggttatttttttttttttttattgtagttatgttatttttttttttttttatttaggaattgatagaggagaggggtttcggatggatagggatagtagggtagaattttagtttttagatttaggggaggggggattgggtgtggggacggtggtgtaaggggtggtgttaggggtggaggatgtatggggagggttggttttaagagtgtagtgttgggggaagggggttaggtgggtttgggatttaggggcgtggttttaattttttttttattaggattttgggaatggtttttaggagtttgttgtggggaggttagggttattagttgaattaattcgattagaatcgtatagcggtgttcgtttttttatagtaagacgttatttaggggtttttacggaggaggtagggaagttcgagggttttagaggagtatggagtatgtgttatattatattatattatattatatatgtgtattatatatgtatatataatagattttttatattatatgcgtatattcgtatattatatatgtatatatatatattatattacgttatgttatatacgtgtattatatatgtatattatgttatattatatatacgatattatatattacgaattatattatattatattatatattatatattgcgagtcgatttggagatggaatcgttgtagttaggcggggtagtatgtagataggagggtttaatataggtaggcgtagtaggtttatagaggaggtttcgggaatttgttttttgtttagttcggagtattaggattttttagtcgtttttttaggggtttgtgggtttagtttttttttggttttgtcggttttatagttttttgtttttttatgtcggttttatttttagtcgtaagcgtttttagtatattatgtggttttgtttttggtggtaggtatttttttttgtcgggttttaaaggggattttggagtagacggtttggagatttttttttgttagatatttttgggtcggggttataagtagggttattagggttattttaggttggggtaggagagtgtttttttttaaaaattatcgtggatatagcggggtttttgtatatttattttcggtgtgttggagttttcggcggtgtttttggttgggcgtgggggttttgttattagtttgttttgggttacgtttagaaattttagttggaggcgcgggtcgtaaagttttgatattttttgttttttttagtttttttttggaggaagtggtgggttgtattatcgtggttttttatttttgttttttttcgttttatagtagttttgatgttagagagcggttttttgagataggtgggatatgttattttttatatgaggtttcggcgagaaggatttgtttttattagatttatatttgggagaggggttcggtttttaggagcgttaggtagaaagggtatttattaggaagaagaatatagaggttatgggagtgaaaagtttgatgttggaaagtaatagtagtatattttgttatagagcggaatgaaaaattttggggagtaaatttttgagttagagaatggagcggaggaattagttaaggaggataaagaggtgggaataggtaagaaaatttgggtgcgtgtacgtattgatatttatttgtatgtgagggcgggaggggatagaatagggatagcgaggaggagatatttaggttataggaggaaggttgcggatttgggcggggacgtggattgcgaggttattgaatattttagggatggatggatgaggttttgttaattagggatattaggaggatattatagaatacgaaagggaaaatattataggtttagagagagagagaagggagaggaggaggaggaggaagaggagggaaagagattatatttagaaaaaaaatttaaattagatatttttagagtaaggatttagatatattattattttaaattttgttttatttatttatttatttttatgtttttagttttttttgagatagagttttgtttttgttatttaggttggagtgtagtggcgtgattttagtttattgtaatttttgtttttcgggtttaagtaatttttttgttttagttttttaagtagttgggattataggtatatgtattattacgtttgggtaatttttgtatttttagtagagatagggttttattatgttgattaggttggttttgaatttttggttttaagtgatttatttatttttgttttttaaagtgttgggattattggcgtgagttatggttttcggtttttaaattttgttttaaagatgttttgtagaaatagatatgaagaaatttatgagaaatataagagtagatgatataaagttgggtaaagaaataagtaaaaattatgatgttataatttgttgatttaaaaaatagtggtaagaatattaacgttgtgaaataaaacgtttagaggattgggttgggaggggttagggagtatattgtcgttttattttatttggggaggaatatagatgtttgttagtgggtattttgatagaaaatatttaagtatatatgttaataatttaagagtttttttaagaataaaaatagtatgtatatatttgaaaaaaaatatgataaatttttattttgggtatggtggtttaaatttgtaattttagtattttgggaggtcgaggtgggaggattatttgagtttaggagttcgagattagtttaggtaatatttggagatttagatttttatttttataaaaaaattttttaagaattcgttaggtatggtagtacgcgatatggtttaggttatttgggaggttgaggtgggagaattgtttgagtttaagaggttgaggttacggtgaattatgtttatattattgtattttagtttgggtaattgagaaaaaaaaaaaaaaaaaaaggtaaattttttaaaagaaaaaagtaagggaaaatagaataaataagaaaggtaaataaaaattaaataataaaatattgggaataattttaaatttattaggaattatagtatttgtgaatgggttatatttttttgttttaaattaataaggttttgcgttgggttttagaaataaagagataaaataagttttaatgaaatgttttttgttaagggtatttttttattatagatttagtttagaaaataatgaagaaggatagaaagagaatattattttattatattcgttgatgatttaaagtaagtaatgattttcgttgcgaacgttacggacgtagtagacgttatgtatatatttttaatgaattagttttgatgaaataataatagaaattaagaaaaatagaaagaataaatgttattattgagtttgaattaggtcgaattttttagatttataaagaagtattaggagggtgtgttagatgatatcgtagggatgtaattagtaaaatttaggttgaagaaatttttataaggtaaatagtatagtataagaggagagacgaagggagagagattttttagattaagagatttaattttttaatagaattaattgtaatgtatggattatattttaaaattattgttaattgttttaagtgtgataatggtttgtggttatgttaaaaagtttttattttttagagttatatgttgaaatatttgtagatggtgtagtataatgttttagatttattttttaataaagaggggtgggttgggttgggggagagtcgggagaggtgttgatataataagattatttgtgagttgattatttttgaagttattgttggggatatggggttttattaatttattttttttatttttgtagatgtgtgaaattttttgtagtaagattaaaaaaatattttaaggaagtgtaaagttattatttcgcgggtataaagttttcgttttgtaagatgaaatggttttggagaagttggtggtgatggttgtatagtattaagtgtttttaatgttacggaaatgtataattttaaatggttaaaatggtgaatttatgttatgtatattttattataattaaaaagtaaaaagtgtaagaaaggttttttattagataaattgttaaaagagaatattgaaggttgaaaataaagaaacggaaaatatacgtatgtgttagaaaatattaacgaagatatcgtgtaatattaaaaagatagaaattaaagtaaaatgtattaaatggataaaggaagatgtagttaatgagagttagaatttatagatagtttagtagttataattttttgtgtgtcgaattttaaaatatataaaataaagattgataaatatataagtaaattgatatagttttaaatagtaaatatttttaatagattttttttagaaataaatatattaggttagtcgcggtggtttatatttgtaattttagtattttgggaggttgatgtgagcggattatttgaggttaggagtttaagattagtttggttaatatggtaaaattttgtttttattaaaaatataaaaattagttgggtatggtggcgtatgtttgtaattttagttatttgggaggttgaggtaggagaattatttaaatttaggaggtagaggttgtagtgagtcgagattgtgttattgtattttagtttgggtgatgagaaggaaatttttatttaaaaataaaaataataataaataaataagaaaaaattaaatagaaatgtaaatttggtaggtagagaatttgaggaacgtaattattcgtttttaatttaaatataattatgttataaagtgggataatgataaatatataattattagattataagggaaataattatatattttaaagtataaagattataaggaggttaaatttacggatataattgaatgaaattagatgttgtttaaaggatggtatgaaagaaaaaaaatagtatttttgaaaagtggatttaaatatagtttagattatatatatttatggtgttatatttacgttacggggtaatgaataagagtttttgaagtgttgttttgaagtttcgtgatttatagattcgtaatattgagatttttttgaaaagtaaaatgtagaaggaggtattgaagaataatatgtatttcgtttttgtagatttatatatttttagagtaggatagtggttatttttgaagatagagaaggttacgggtttgggagatggaagtagagggttttaaagttttattgtagagttttttttattaaaaaggaagaaaaagttttgggtaagttaggtaatatgttaagatttggtaagatgagaggtagttgtttggggattggtattagtgttttttatgttgttttgtatttttaaaatagtttatattttttttttttttttaaaggagttaggaggaagtgattgtaaatgagtagaaggattttttagggggtggaaatgttttgaaattagattgtggtgatgattgtataatttcgtaaattttttttttgttgttgttgtttttttttttttttttttaatagagattaggtttcgttacgttgttaaggttatggtgagttaagattatattattgtattttagtttgggtgatagagtaagattttgttagaaagaaagaaaggaagaaggaagggagggagggagggaaggaaggaaggaaggaaggaaggaaggaaggaaggaaggaaggaaggaaggaaggaaaaagaaaagaaaaaataaaaattgaatttatatgagaattatagtttataagaggtaggtttggatttgtggtttaattttaattagattgattgttagtaaaataaaaagattattgttgtttagaggattttagtagaatttagagttttattaaataatatttaaaatgtttatgatataatttaaaagtatttaaatagtaataaagaaaattttgagaatttgtaagagaaaagataattaatagatgttaatttcgagataattttaatgttgaaatgattatacggagtattaaaatagttgttagaggtcgggcgcgggggtttacgtttgtaattttagtatttttggaggtcgaggcgggtggattacgaggttaggagttcgagattattttggtt

SEQ ID NO: 2147 - DNA, 113515 bp, Artificial Sequence
  chemically treated genomic DNA (Homo sapiens)
atgtgttatatgttaaagttatttttaaatagggtatttagttttgtaaggtgataaaagaaagtagaagattgtaaatggatgcggtggttttttgtgtaaattagagtgtatatttaaagattttatgttaaaagtaattattgttatttgtaaaattattaaattggttatcgggaatagatgggtatagtattataaaggtatattttatttttgtttgaaattatattgcgaaagatgaaaatttgatatttatttatttagttattaattgtattttgtgttgtgtagaagagaaattaagtttggaggagaaggaaagcggttaaagaagagttttagcggaattgagttagtaaagtttgagaatattgtttgagagggtggaagtatgggttatggttagtgagtttgtagggtatatttttttattttgttattgttgttttttttgaagtgaattgtagtttttaagggaagatgtatatttttgtattattaaatggaggtaattagaaaggaaattagattttatttgtgatttttttttttttattttatttttttttgagaattaaaattagggacgatgtcgttttgtttatgatttttaaatgttgttatatttaagtatttgttttttaagttttgagtgagtttttattttgtttttttaagagaggtatgttagataaagattatatttgttatttttaaattttatttttatttagtgtagttgaaagttttttaaaaaggtaagttgttttttgaaaaaaataatgagtttaagagagttttagttaaatgtattggaaaaatatgtttatttgattgttaagaaatagattagtatgtttaatttatataaatatatatttaaaaaaagatattttaaataatagtaaattatagatgttatttaaataaaattttttgtattatttttaatggttatgtatttttttttatttgtttgttttgttttttgttttgagatagggtttggttttgttattgaggttggaatttaacggtatgatttgggtgtattgtagtttcgattttttgggtttaagtagtttttttatttaggttttttgagtagttgggattatagatgtttattatttattattatttttggttaatttttgtattttttgtagagatggggttttatcgtgttgttcgggttggttttaaatttttgagtttaagtgatttttttgttttggttttttaaagtgttgggattataggtatgagttatcgagtcgggttttagatgtatttttaaaattaattattttttaaagtgtagtttttggttgaatttgtatagaattatttggggtattatttaaaagttgatattttaattttttatttcggatatattgatttagaattttttaatttagggttttggagtttatgtttagtaaagattttaggtgttttttattttttgtagaaaaataggaaaaaaaaaaagaaagaaaagaaaaattaataattaaaatataaggaaaataataatttttggaaattgtgaaagagggttttattttgtgtgatttttttagaatttgattaagataattatatattttggtttatttttgtttatgtagatataaataagagataattaaggtgtttttttattttttttgttaaatgtgtgtttgtttatttaagttaaattaaagttaatgtgaagttaaatttttttttagataaattcggattatgggggttaaggagatttggagaaagatatattaagtatcgttttattagttgtattcgagggttttatttttttatttattatttttttagtatatttttagggttttttttttttgtggttggtttttatgaatttagattgtggtttatttggtaatgttaaaagttagagaatttttatgttttagtttgtaaggtgagttgtataataagttgggtatatatgggtagaatgaaaataaaataaaataaaaaaatatcgaaatttgattgttattttgattttattagaatgttttttttttaaaagttattttaagttgtaattaaagtaaataatatgagaaaggtttgcgtaattatagaggatgtttgtgattattttaaaggaagaaagtaatataattgtaaatattattttaatatatttataataaggtggttttatatgtttaaaattaagttttttgttaaattgattgtttttttttgtggtttattataaaacgtatttatttatagaaatgaatatgttatggaatttatataagtagtatatatattgttttttaaaaaaaaaaaaaaacggtaatttttgtgaatatttaaaggttgtttttaaaagtttagtatgtttgtttttgtgattttattttttggaatatgtattttatgatatgatatgtaaaattataaattaaagttatttaagaaaatgtcggtgtatataatatttttgtttttattaagattatatatttgtttaattttaaaattttaaataggttaggtacggtggtttacgtttgtaattttagtattttgggaggttgaggtaggtagattacgaggttaggagatcgagattattttggttaatacggtgaaatttcgtttttattaaaaatataaaaaattagttgggcgtggtggcgggcgtttgtagttttagtaattcgggaggttgaggtaggagaatggcgtgaattcgggaggcggaggttgtagtgagtcgagattgtattattgtattttagtttgggtgatagtgagatttcgttttaaaataaaataaaataattttaaataaatattaggaaaggattttttatagtttttggaaatgtttttagtaatttataaatgaaagtgataatatttagaagataatttcggtatttagatattattatttattgatatttggttttatatatatgtttgtttggggttattatagttagtttttttatttttcgttaatattatgtttaatatatttaaaaaatatttttatttgtaattttgagtaattttaaaataaattattgaagtcgtgtaagtttatgttaaaattattaggtttttagtttaagtaaagagtggttttaatttttttggtattagggattggttttatggaggataatttttttatggatttgggggtagtaagtgatggtttggggatgaaattgttttattttagatcgatattagatttttataaggagtgcgttatttagatatttcgtatgtatagtttattataggattgaagtttttattagaatttaatgttgttattgattttttatttgaggtatagtttaggtagtaatgttttttggtttgtcgcggtttagtttttaataggttattgttattgtgaagagttttaggatggtgatggtagaataggttttttaagagtgcgattgtattattgtatagtttgtatgtttatgaaattggttttgtttatagaattttttgaataagatgattttgattttttaattcgttgagaaatatattaaggttaattaatttgattggtttttttgatttaagttatgtgaagaaatatatatgtaagatgatgtatttgaaaagtatttataataggatagttgtagatggttgttattgtaatttgttaataggtagattttaaaattgtagagtggaatttgtgtataagaatagggaaaagggtgggaaattgtaaaataattatataggttttgtgtaaagaggattttagttttttgatgtagttttgagtagagcgagtgtatttagatattttgattgtgtttagttgggtgtttatagagatttcgttttcgaaggtgaaagtgtaattgggtaggagagggtggagatgttagagtaaaggaatagtagttagttgttgtttattcgaataggagtgtgtttgggttttttttttttgggtttttttatttgtaaggggattgttattttttgatggggtttaggggagtgtagagttttgttataagttgtgttttattaatgttttttgtttttttgtggtaggattttggttggggagggagaatttgtgtgttgagagaatattagataaaaacgataggagaggacggagtagttattttaaagttaaaaagtttgagttaagaggttcgggtaaatcgtggggaaagaaagagattaagacgtaagtttatttagaataaattatttattttggggcgtgtaaggtttattagaaaaatagatatttgaggaaataaggcgtgtggatttaaaggtggttagttatgtattgagattgtttttagggaaaatagtgcgggagggagggagggagggatgcgggaaggacggaagaaatgtaagagggagagaaggaggaatttgttttcgggatattgtagggtaaatgtttacgttttttttttcgtttgttttattgttatttgttttttttatttttttttattatttgggtaaaggaaattcgaatatgtgaaagcgtgggaaaagtttggatttaggggaggtcggggagaaagtaagttatttaggggcgcggggttaatttttaggtaggtgggacgtttttgggggttttgaggtttttttttttttgttgaagggagtattttttttggtaggtttggatttgtttatatcgacgtttatttggacggagggggaaggtgggaggggtaggaagcggttggtgcgaacgggagaggcgtttgcgtgggagttgggtttttcgagatttgcgcggcgtggaaagtcgttcggcgtcgttttttttcggagcgttcgggttcgtagttgacgagatcggtttatgggttttgcgttcggtttttttgttatttatacgttttttagttaatggtgcggttttttgttttttttattttatttttcgagggcgagttgggagggaggtcggcgaggagggttcggtcggagttgaaggattgaatttttcggtttagtcgcggcgtttgtttggtttttagtagtgtagtttcggcgcggagtagggagtttcggttcgcgttcggcgttttcgttttcgttttcgattcgtagttatggtgttcggggtgttcggcgcggttttgattttttgtttttggttggcggtttttagcggttgtttggcggtcggtttcggcgcggttgttgcgcggcggttggacgagtcgttgtttgtcgggagcgtttagcgcgttcgttgcgtttttaggtgtttgagtttgtagattattcgtattttcgtttttttttagtatttttaggtacggggaggttttcgttcgggttttttttggggttgcggtcgcggcgtgggcgtatcggggcgcgcgttttttagtttgggttcgtaaagttttcggttagcgtcgtcggttgattttggttttttttgggcgtggattttatagtcggggtgttggaatttttttttttagttttttttcggtttttgaaaagaaaaagaagttcgagatattttgttttaatttttttttttttagtaggaaattaaaggcgatttttttggggagggagagtcgtggatgttgggagtgggtgtgtggatgtggcggtttttcgggaattggagtgcgcgagatttcgggcgggcggcgattttcgtaaagttttaggcgtttcggggtattgggagggagtttgggaggcgcgttcggttgcgtttggggattttatttcgagttttagtttcgtaggtgttcgcgggtcgatattttgttttttttgaaagatggtttttattttttgagggtttagagttcgttgtttatttttggagttttagttagggtatttgtgttaagtcgtgttttagggtgcgtgtatgcgcgtgttgggggtgcgagtggttgtgcgcgttttaattcggaattttaaagatttaaggttttgttttggattagcgtagagcgttagggaagaagtgtcggggataggggatttggcggggtcgtattcggatattttttaacgagtttcgggggaatcgttttttaaatttcgaacgtaggtttttttagtttgagggtggggagtatgtgtgtgtgcgcgcgcgtttgtgtgggaggtttcgggagtcgcgcgtttggttttagcgggttgtcgggattttgttttgtggcgcggattttcgcgggatttgcgcgaggtttcgggtgcgggtgggcgtacgagagtaggtttcggatttagcgcgagcgagtgtagttgttgtttgtattagttttgtcgagcgtgcgagttttgaaatttttcgtttatttttttttttttttatttttttttttttttttttttcgtttttatttttaggtgtttatttgttttaagtttttaatttttcgttttagggaaattttggagggattaaaaggagaaatgggggttggggggaggggtttttttggttgggcgggaattggaagttaaatttttggtttttaaattgggcgttttttttgttagagttgggttaaggggtgggggggggggtttttttagaggttttgggaattaagttgttagaggaggttatattaataagggtggaatgtggaagtgattttttttattttcggggatgattttgaatcggttggtgaagttggcgcgttcgcgagtgtgtagttgagtttgttttaagtcgtagaagtagcgtttcgtgggtgttagagaaatgggtacgttttgtagtttttttgcgtttttagggaatggaagatttagtgtttattttttgtggtgaaattatttagatattttggatagagttaggagagggtcgatttttaggtatttggtttttagtttttcgagttttattttgaaagttatttttttaagatgttatattattgtttgaaataatagaaaataaaataaaacggagtagtttatttttagggagaaagagtatttttttttttttttttttttgaattgttagtgttgtaatttatttgttttatagttttagtggttaaagtattagtttagatgaagttagttttcgtgaaaggttttttttgtggtttttttggtatgatttttttttggaagaaaaattgttgatagaatgtatattgttagataattttgattatattttaattagttgggggtgaaataagttgtaaattatttagttaagatttaataagtgttgtgtttgtaattaattgtaaagttattttgggagttttaattttaatttggtaatgtttatttgatttatttaaattgtagggattaagtgtttttaagatttgaaaagttagtaatatattttttttataaaattttaagtttttttgttttttatcgtttgtttttttttttttttttttttttttttttttttaataattagaaggaagatgggtcgggcgtagtggtttatgtttttaatttttgtattttgggaggttaaggcgggtagattatttgaggttaggagtttgagattagtttggttaatttgaaatttcgtttttataaaaaatataaaaattagtttggtgtagtggtgtatgttgtagttttagttatttaggaggttgagggaggagaatttttgaattcgggaggtagcggttgtagtgagtcgagattatattattgtattttagtttgggtgatagagtaagattgttttaaaaaaaaaaaaaaaaaaaaaaaaaaaggaaggaaggtggagtaattagtttgtagataatttatgattgggttacgggaagttttaagaagattgtttttttatagggttattttcgtttttaatttttgtaaatgagtttatttataaagttgtttttggagtaggtgtttgtttttatttttttttgtacggttttaggttatgtttaaggatgggagaagtttgtttggtttttagtttggatgttcgttaggtatgtggatttttaattatgaaagttgttaggttttgttttaggagagcgtaatttatgtatttatggtgtaggtagtgatatagattttttggggtagtgatttgttgtcgtcggtttgtagaggaagttgtcgttttatagtttgtgttttagttgtttttattgttttttattgtttagttttttagtaataagatagaaaagtagtgggtagatgtgtatatttgatatttttaggtttgtaggttgtttttgttttatttgtataaagtggttgttaattacgtttaaaaatataagggatttagtattgaggtatgggggtgggaatgtagattagggatatttgagtaatttaatattgttttgatttggaaaggaagaaaggaagatgggatggaaattttattattttattattgaatgttgttttttatttacgaaaagaaatagtgtatgttagtattttttgaaatattagtatttggttttaggatgttttgtttaggttatttggtatggagttattttaggtttataagtagaatatatatgtgcggttagtagagtgaagaggagttgtgggtttgtgaggtatggaatagggaagtgggttttggggttgtgtagatttgttttatatttaggttttgtagcgtcgcgaatgggtagtttgggtgtattatattatttttttgaatgttaattttttatatgtttagtgggggagagaagtatttgttttgtaagatgtaattaggatgtaaaatatgttggggtgatgtaggtgatggtaatatagtagttagtattattcggaagattattaaggagtagttatttttttgggtattttataagtattatttttttaatttttataatatttttaggaggtagttattaaattagggaagaatttagaggttttgaaaagttggtttattatatagtttattgacgatttagtcgggttaatagtgaggatggtttttagtttttggttttgtttttatttttaagattttgttggttagttggataatttattttaggattgattatttaatttttaggttttggtgtaaaataaaaacgtggggttttttagtaagaaaaaaagtgtttgttaaaggaaataagatataaaacgttttttttttttttgttatttgtttttgttaatttgttatggtgttttaaattttttatttatgttgtttttagtgaagaaaattttaaagtttaattttagtatgacgttaattttttttttttatattgtgtaatgttagttttatatgtaaatattagagtatttaatttttggagggagttttgaaatggttagagggtttaataggttagattcgggaatggtggaaggaggaagagaaggtttttttaaggttttggggtgtgtttagggaatatttatgttttataggtatttagggttttgggtttagatatatgtgtttaggtatgatgttggttaggtttttttttttgtttgttgttgtattcggggattgtatttttgtttggtataggttttttggaaattgagttaggtgttttttttttataggttagttgtttttgtttttagtagatgggtagtttttaggtttattgtattttttttagtggatgtgttattttagtgttttagaatcgtgttggttatttattaaatatattattatgttattagtatggaatggggatagatataattatattatgggatattgtatgatatgtatatggttaattttgattttttttatatttatgttcggtttttgtagggattatagtgggtagggattatgtgatgggaggtggggagtagaaggttagtggggtttgaggtgttaggtgatgggggaatgggcggtgagaatttgttttggagaggtgagggtgcggtgggagttaggattggttttgagttgatatgtttattttttagtgagtattgtagtgtgttattgatttttatatataaaatttaaatttaaagaattttagtatggttattgtagagtatattttaagtttaggtttttttgtgagtatatagtggattgtattgtttatacgtttgtgaaattgatttaatttgttttgtttgtatgttaaagatttagttatttgggaaagtttaaatttattttggagtggcggttttttatagggttatttgtaatgttaaagggtacgatgttgatatatgtttatttagggagaaatatttttttttttatgtttttaatttttttagaagattaaagaagaaggaaaggagggaggtggtgtttgagataagttttgtttttttataggtgatttttgatgtatttgagagtgattttatgttttatgttttattttggatatttttgtttttttgattttttttgggtttgtttatgatggtataggtgtagttgagttttaagttttaaatataattagttttttaagtatgggtaggtttgggatttgttattggtaattttagtattggtaggtttgggatttgttttttgtttgtttgtgtttttttaatggaggtttaaaatagtagggtttgaggaaaagtagtagttcgtgggtaagtgaggcgggatgtgtgtgtatgtgtgtttgtgtttttgttagattttagaatgtttagggagaaagtggatgggattttgttggaagattaatagtaggttgttggtagtttggttttagggttttagaattgtattgatgttaagagatttttttttaatgggacgttattcgttttataaagtattatcgataggttttttttggtagttgattagagattagaggttttttttagtagtaattggaagttgtttgttttggtaaaaaggagaatgaagttggtgatgagattattttatttagagggttagttttttttttaaggtaaagtaaataaataattagcgtattaaaattttagtagttataaattagttttaggtttatagattttagaggaatggattttgtggtgtttatatttagtttacgatgtgtttttttgttttgtgttgagtttttagttatattgtaggatggttaggtatttagagagtcgttgggagaattacgattcgatgtagtttggttttggtgttttttggtttgagttattggttttttggttgcgtttttaatacgttttgaatttgatttaaaagaaattttatattatttattgtaattttttgtgtttttaatatggtatttttttttgaatatgatttaaaattttattttattgtgattgtaatagaatatttaaaaaataatagaaaatatatttattaatttgtttatttttttatgtagtatattaaatatatatatttgtatatatatatatttgtatatatatatttgtatatatatatatttgtatatatatatttgtatatatatatatttgtatatatatatttgtatatatatatatttgtatatatatttgtatatatatatttgtatatatatatatttgtatatatatatttgtatatatatatttgtatatatgtatatttgtatatatatatttgtatatatatatttgtatatatatatatatttgtatataatattatttatttatatgtgtgtatttggatatttaaattaaaaaggtaatattgttggtgtaagtgtttttatttttaaaaatgtaattataaatttggaggttattatatttatttaaaataaatttattattttttatgtttttatttattaggtatgttttagtgaatgagtataaaatgttggggttaaggtagagagatttatgaaagtgttagggggtattgtttgtattaagttagaaatggagaagttttaatggattatttggtattgttgtttagaaatttgatttttatattattttggggggaagagaggtttgggatagtaattaatgaagtatatttatattattaaaaggtatttttatttatgaaataggaatagaaataattgaaaatgtttttttgtagtgttttgtgtaaagtatagaataatataatttttgggtattatttaagtttatagagttttagggttttgaagttagttattttttaatttttttatttaatttattttggtttttatattttgaaagtaggttgtttattaatatatggcgtttattaagtatgatttagttttttttttttatattaattaaagatagttataatttttttaagttttagattagtattaggttgtttttatgattagagttgattgataaaatgaatagttatgatattttagttttttttgtattattattttaggaaaatgtgttattttggggagttttttgaaatattttaaaagaggtgatatatattaattttttttttagtcgatgtagttgttgattttttgttttttattttattatttttcggtttttgtattagttgttaatagtttatagttgtttttttttaagggaataatttttggtcgatgggtattattttgtttgtaaggttatgtattttttttttttgatgtgcgtagattatggcgattggttttttgtttaggggatataggaggttagttttttgttggaattagttttgtaatgtaatttatgtttaaaagtatcgtatgggattaggtttatgtagggttttggttgagagtttatttttatataggttttatttttgtttttttttgttttttttttttttttttttattgagagttttttttttcgttttaatattattttatgttcgagaaattttattttaatttttgtttttaggaaatttagtttaagatatttttttttagaaatacgtggttttatttaatatttttgttttttttgattagataattcggtttttatagaaatgatttgtttaagttagtaggtagaataagtaaaaatataagttagtttttatatttttagttaagattttatttattattttttaaaaaattgagagggtatataaagtttaaatattattttaaataaagaaatagatttagaagattttttgttatttgaatttagtttttagtttttgatgattttagtaaaaagattttaatttttggatttagtaggtaagtatattatgtttttttattgttgagaatttaatgaaatgtgaaaatatgtattgtttaggtaagtttgaaatagttgtagggtaagtgggtagtagttggagtgagaggatattattaacgatagtattatatggtaggtttaggaagaaggtaagggagttttaatagtttaggtattagttaatattggatttatttagtatgtaattagtggagttatattttaaaaaagttatattttttaggatttgtaattttttgtatattttaaaaatgtaatttgtgtatggttttaaagaggtgaggggagatattttttttgatggtaaagagggttggataaaaatagttatatttattagttaatatgtaaaaaatgtttagaaaggaataaatgtagtatttgtagattgtttttatgtaaattattgtttgtataggtgttgaatttgtttttttttttaaaaagtattgatttatttgtatttttttgattattagtgatgttgagtatgttttttatacgtttgttggttagttgtatatttttttttgagaattgtttatttatgtttttagtttattttttgatgggattgtttgttttttttttttgttgatttgtttgagttttttgtagattttggatattagttatttgttagatgtataggttgtgaagatttttttttattttgtgggttgtttgtttattttgttgattgttttttttgtcgcgtaaaagttttttagtttaattaagttttatttatttatttttgtttttgttgtgtttggttttgggtatttggttatgaaatttttgtttaagttagtgttttaaagggttattttaatgttattttttagaatttttatagttttaggttttagatttaagtttttgatttattttgagttgatttttatataaatgagagacgaggatttagttttatttttttatatgtggtttgttaattattttagtatcgtttgttgaatagggtgttttttttatattttatgtttttgtttgttttgtcgaattacgatgtggtattattttattttcgtaagaatggttattattaaaaaattaaaaaataatagatgttgatatggatgtagtgaaaagggaatatttttatattattggtgggaatgtaaattagtaaaatagtgtggaggttttttaaagaattaaaagtagaattattatttgatttagtaattttattattggatatttatttagagaaaaataagttattatatgaaaaaagatatttgtatacgtaattgtaaaaatgtggaattagtttaaatttttattaattaatgagtggataaagaaattgtggtgtgtatgtgtgtgtgtgtgtgtgtgtgtgtgtgtgtatatatataatggagtattatttagatataaaaaggaatgaattgatggtattcgtagtaatttggatgggattggagattattattgtaagtgaagtaatttaggaatggaaaattaaatattgtatgtttttatttgtaagtgggaattaagttatgaggatgtaaagttttaagagtgatataatggattttggggatttcgggggaaagggtgggaagggggtgagtgataaaagattatatattgggtttagtgtatattgtttgggtgatgggtgtattaaaattttataagttattattaaagaatttatttgtgtaattaaatattatttgttttttaaaaatttatagaaatgtatttttttaaaaagtattgatttaataagttgtatttattttagttaatattagtggattgttataattttaaagatgagttaaaatttttgtatatgaggaatttagggtttattttaggttaagatttgtttgtaaatagataagtttagtttaatagatggagttttttgtatgagattttagaggagggagggtgtttatttttttagggaaagttttataattgttagttgagttattttagtttggaatagtatgtgtataaatatagagttttgtaatagtgtggtttgttgttggggattataatttaaatggttatgatatagtattagttttttagttagtagttagattttgggaatttgttagagaaggaataaatagttataaagtttaagtgttttgttttgtaaggtaggttaagagtatgtttattgtaatatgatgttatatttaagttataatatttagggatgtgtgttttgttggtttttgttaatttggttgaattttaatttttaatgttttttagttgatttttatggagatttttggttatatttttaagaaagagtttaagaaagaagaagggaggaaaaggaggttattttttggtttgcggttggatatagtttttgaattagtggaaattagaagtttttcggaatttttgagttataggatagaaggtatttagtattgtattttatagtgttttggagttgatatagttgttttatataaaatatttatttgattattataattattttgtgaggttaggaatgttatttttttttatagataagaaaattgaaggtttgaaaatgagataattaaggatttatagtagaaatttaagtttttattgttatatttttagatatttgtattgaatgattttattttttagtatgttaatagcgagagaagatagaggggaaatagtatttatattatgatttagagatatttagttgtaagggaattaggacgggattttttattggtttttggaggtagttttgtattatagttgtatagatgaggataattgaaaggttgttggtgtgatagaaaatggtttgaaaaatattagtttattaatattatttcgattggtggtgtacgtatttatttaatttatttttttaattaataagaatttgtaaaatataatcgttttttaggtattttagattgtgaggttttagtatatgtgagatgtgttttttgtttttaaaataattattttttttataaattttttgtttgttgtttatataaggtttttttttgttatttagattagagtgtagtgttatgattatattttattgtagttttgtatttttaggtttaagaaatttttttttaattttttgagtaattgggattataggtgtgttatattttcgtatttggttattttttttttaagttttttgtttttgtttttgtttttttttagagatggggttttgttatgttgattaggttagttttaaatttttggtttttagtgattttgttgtattagttttttaaagtattgagattataggtgtgagttattatatttggttaagagaattattttttattggagagaaggataaatatttaataaaattgttgtaagttgttgacgtgaagaaagaaattattaaaattatgaatcgttttttaaatttttatatatagtaatttaatttatgattatggatattgatattttttagatgaagaatgtttttttttgtttttgttaattgtttttttttaggtttatttaattttttatgtatgtaatgaaatagtagagttttatcgagatttttggggaagcgttttaagtagttggagttttcgatattataggggatgtttgttgtttgtaataaaagttgcggtgtttttatttttggttgtgttgttgttgtgtatgttggtgggatatgtgtggagttattgtgtatggtaattgtagtttgtatgtatgtgatagttatttttacgagtttagtgtgtttgatatgtttgttttattgttttttgtttgggttttggttatgtgtgtgtgtgtttatattttataatttttttcggtatttttgtaaaatataaaagttaggtaatgaggaaattttttaaaaaaagaattttgaaaatttttaaggttgtatatgagaataagatggtaaagatgtgaagttttggggttttttaattttcgaagttttaaaatttttttttaggggagtttgagaaataatatttattaaaaggtttgaaaagaattcggtaattaattaaggtttttaatttatattttgtttatttttttgttttgaattataatttttttatttttataaggttttttttttgttttttaagttgttaatattttagaaaatatttttttagtgagtttaaaaatatataattttgtgttttatattattttgatttttataaagataacgtagatatgttgttattatttaaaaagttatataatgggttaggtgcggtggttttcgtttgtaattttagtattttgggaggttaaggtgggtagatcgtttgagtttaggagtttgagattagtttggttaatatggtaaaattttatttttattaaaaatataaaaattagttaggtatggtggtgcgtatttgtagttttagttattagggaggttgaggtagaagaatttttggaatttgggaggtggaggttgtagtaagtcgagattgtgttattgtattttagtttgggtgataaagaatttgttgagttttttgaagggtttatttaaggaaagttgattaatttttgtttaaatttttaatagggtattattgtaagagatagtttatttagatttatataaatattttagtttttgtttttaaatgtttatattgttggaagtaatgatatttttttgaaatgtagattttttgttatattgtgtatattagaaagaaagttgattaaaatttgtaagtttaaaatacgggagagagatttttaatagaatatatagtttatattgatatgtgttattttattaattggataggtttagagtgttgttataataaatttagtatgttaaggaggattgtattttagggttattagtttgttttttaattgataggattttcgtagaatgtaaattgtaagattttttataattataacgaatagtgataatagaattatttttataattggaagtatacgaatattttttgagaattttgtattaataatttttgatgtagcgttgagatttttatttttttttttttatggttagatatttttgtttttgttaattgttgttttatttttcgtttgatggttatttttgtttagtggatagagttttgtttatttagaggcgtaattgtgtttaaaataaggagtagagaattacgtagttgtaaggagatgttatggtaattagatattagaggttatttatttttgtttaatagttttgttatatgaatgatttatataaaggtagaattataaattatattatagtattggcgtttggtttttagagttgaaattaattttgttgatgttatgaatgttaagtttatgtagaagttattgattttttttagatagaatgagaagaaaatgggaggttagttgttgtgaatatgttttgataattgtgttttttttaaattttatttgtggtaagaagggataaagacgttatttagggtggtgtttattattaattgtttgaaggtgggtattttgttttttatttttttttttatgttttgggttattaaagttatttggggttaggtatggtagtttacgtttgtatttttagtgttttgggaggttgaggtgggagaatcgtttgagtttaggagtttaaggttgtaatgagttttagtggtattattgtattttagttgggtgataagagtgagattgtgtttttaaaatagaaaagttatttggaattagaattttgtttttaaaatttaaaatatgtgttttatatatttttgatggatagtgttattatattttttgtttaattatttattttttaaattttgaatttttatttattttatttatttacgttttgagatagggttttattttgttatttaggttggagtgtagtggtgtaattatggtttattgtagttttaaattttttggtttaaggatttttttattttagttttttaagtagttggtatataggtttgtattattacgtttggttaattttttaatagtttgtagagataagtttttattatattgtttaggtttgagtttttattttttgaaaatagagatagggttttattatgttgtttaggttggttttgaatttttggttataagagatttttttatttgggttttttaaagtgttgggattataggtgtgagttattgtgttaggttagtttattatatttttgagtagaaatgtattgttttttttttttcgtttttttttgatttttttttttttttttttttttttttttttttttttattttgatatttggttgtattattttgaaagtagtatagttaaatttagtggttattattttagaaatggtttatatttgggaagtattttttttttttttattgggttagaatttaaaagaaagtagagaatattttttggttgtttttgttgtttttatatttttgtattcggagttatgagttaatgtttttatagttgtaaagaaattttttaaaaaaaatttggatagaatatattttttggttatgtattataattattagaaaaataaatatagattagtcgattatttgtaatttttatttttttattatttaggagttatagatttttgtaatgttttaaatttgtttttaatagggtaagatttgtatattttagtttattttattattttataattttgaaaagaagatggaggttgtttttttatataattttatgaaattagggttagaatttaatttttatatattcgtttgtgtgtatattatgtatgcgtttttagtttagggtttgttaattatgatattgtggacgttttggagtagatttttttttgttgagtggaggggttgtttggtgtattttaatggttttatagtatttttggtttttttttatttaatgttagtattatgttttttatttttagttatgataaaattgatgtttttaaatatagtagtatgtgaatatttgtatcgggatatttatatttattttatttgtttttgtttttgggtttttatttttgtgtttgtttttatttgtatatgttttgtttttattttatggtaaatattttggtagttatgatatggtttagttttttgtttttaggaaatattaagggtttgtgttgtgttaggttttttgttaggcgttggtgttgttaagatgattaaggtacgtgtttttatttttaaaggattgtgttagggaattggggtgtatagatataaatgaggtgttaggtgttattagtttagagatgggaggttataagaggaggggttatagggtgatttagagtgtattgtggatttagatcgttggtgttttattttggttttgtttttttttatgtttatatttttgttgtaagtaattttggaattaaaattgatgttgtgaattttttcgtttatgaggagatatggatatttttatttatagttagaggagaaggtttgggttttgagatgattataaaaggatagggttagtttgataagtttttattttttgaataaatgagattttgtagtattttgttaagttttttttttttaaacgaaaattttattttttttgcgtttttggtaattttgattgtgaagatgtgtcgtggtatgtgagtatgattatataagtagatggatggttttatttatgagtagatttatgtaaatttagttatgttgtatttttttttttaaatttatattattattatttttgttggtgagttggttttaaggttttttgtttttgggatttttttgtaagtaaatttttttttttttttgaagattgttgtttttgtttttttttttagatcgtcgattgttttttgtttttattttgacggtggtgttgttttattgagttttttgggatgttatgtattttatttagaatagagttttttatttggttttatagacgcgttggttgttattaggttgagttaggtttagagggagtgtttggtgttgatgattttgggatttaaaaatagtgtggtgtatgtttgtagttttagtcgtttgagagattgaggagggacgattatagtttaggagttttagtttagtttgggtaatacggtgagattttatcgttaaaataaaatgaatagtatgtaattttggatttttagtgttttatagtttggtttgagagatttttttatttttaaaagagatttaaaaatttaattttttaatttaagagattttttttagtttgttttgaagtatttagtttaattagtagagtatgatatgtagatttttcgtgtgtgtttttgttatttaaagattttttattttgggtggttatggtgggtttgttattttagtgttttgggaggttgagatgggaggattatttgagttcgggaatttgagattagtttgggtattagagtgagattttatttttattaaaaaaaaaaaaaagaaaaagaaaaaattagttaggtttggtggtgtatattttttgtttttgttatttgggagtttgaggtagaaggattgtttgagtttaggatgttgaggttatagtgagttatgattgagttattgtattttagtttaggtgatagagagattttgtttttgaaaaaagagaaatattttattttttcgtatgatgtataggataagattaagtagatttttaaattgaaatttgaaattttggataaatattgtgtaaggaaaaaaagttatttaattttaagttatttattttattgggaaaatatatttgattttttagatatttttttaattttgtaatgaatatattttttttggaatgagttttatttttttgtaaagtagtttttttttggggttattgttttttgcgtttgtattatatttaattaattatgtttttttaagtgattttttattaaaatatattgttttttgaagtttatattaaaataatttagaattatgatgaatgggttagaatataagttagggtataatagattatgaggtattttattttagtttgatgaattattttgtattttttaatgaataatataaattagtataatgaaaaagtatatattataagaaaataatgtgataaaaatttgatatttagtaaagttaattagaaggggaaaatatgtatttttagttatttttttttttttttttgggtgttttttattataaatgaagtttaattattaagttttgtattttttagtttatatgtgtatagtaagatgggggttttgttttattattaaaataataatttttaggatttattaggtatattttaaaatgtgttgttaaaatatttagtagggaagtatatggaaataatagtttttatttttggggtacggtacgtttttttaattagatttttttttaatggttatagtgataatagtaatagtttttagtttatgttattcggaagtatattttttttatttatttttaatgtatgtgagtaattagtttgataatttaatattaatttttaatttttgttggttaatatgttagattttaggtagtaatgtgttttgtgggaatgatttgttatgtataatatattgtatttgttaagttttgtagttgttaagtatttattttgaaaaataatagggtgatttgagagtgtttttaaagtttgttttgtgtttttgttatatagttatttttagtaagaaattatatgtttttatagttgttttgtatgaaaatggttagagattgagatgaggttaagatagtagaggttagagaggtttagatcgttttgaatgttgttattttgagttttggttttggagaaaaagaaattagtatatgtaaagattaatttattgttttataaagagggttgtttttttttaatgataagaatttaataagatatttgtaagagttgaataagggttttagttatttatttgggatatttggaagggagagaagagagatatttgggtcggatacggtggtttatgtttgtaattttagtattttgggaggtcgaggtaggtggattatttgaggttaggagtttaagattagtttggttaatttggtgaaatttcgtttttattaaaaatataaaaattagttaggcgtggtggtgggcgtttgtaattttagttttttgggaggttgaggtaggagaattatttgaattcgggaggcggaggttgtagtgagttgagatcgcgtcgttgtattttagtttgggtgatagagtgagattttattttaaaaaaaaaagaaagaaagaaaaaaaaaagaaagaaaggagatatttggagtgtatttcgtgaagttatataaagtaaaggaagagtaagtattttaggttttcgtggggattagttatatttggataatttgtaaaatagttgattgttttttagttttaggagttttgattttacgagtgtaaggtatattattagaatttgtaaaagtttttaggtgaggttgatattattggttttagtattatattttgaaagttattgttttagttagttatgttgtcgggtttttttttggtatttttttttgtttgataagaggtgttaagttttagttttggaattgtttattttttattttttagtttggatatttttttgggtagttttttttgatttaggttatgtataattgattaagtgtgagtttattaagtagaagttagtggtggtgtttttagtagaaatattattataggtttatttagaattagtagatttatttgttaaatgagagggttggagttattgtttggttgttatgttttttgaaatatgagttttgattttattttgttgatagatgaagaggttattgttaatttttttgaatatatgtgtttagggagagagagtgggttttttgggagagaatgggttattagtaattaaggtttaggtatggaataaagattaggaatataaagttgaaggttttattagagggtgtaatattttaaaagtagattggttatatttggggagaattgtgtgtttggttaaattattttattatgacggtgtggtttttttatgtttatttaagtaattaatttttattaaaattggattatttgattttaaatagtttatattatggattataaatgtttttttatgatatatttatttgttgttagattgaagtattttatgaaaggaaaaattattgttagtgagatggatagatgggttgttataaaatattatgttttgatatttgttgggagatggtaaggaggttaaagtgaagaaataaatattgatagtgagttgaagtaaattgaaaaaataatacgtgaatatattaatatatagattattaattgaggtgtaggttgaagtgtggttgaaataatgtagtatttgttttatggttttaatttattttagtcgttttcggattgaataatgtatttttaattttatatgttgatgttttaatttttagttttttagaaagtgataaagtggttttatttggaaataacgtcgttagagatgtgattaattgagatgagttattttggaggagggtaggtttttaatttaatatgattggtgtttttattgaaaggagaaattttaatatagatatgtagagatgtgaggatacggatgtgaaggttggaatgttgttataagttaaggaattattagaagtttaaagaaagttatggagttaatttttttttatggtttttttgagagagtatggttttgcgataatttggttttatatttttagtttttagaatcgagagataataaatttttgtttttttagttttttgggttgtggtattttgttatggtagtcgtaggaaataaagttatatattttaatgtgaatttgaaattatattaagaatagtatttgatagtattgtatttttatgtttttttaagtggggttttgatatgtgaatttaatttagtgtgattttgtattaaataattgtatagattttattttttatatggatattatgtttttgtaaagatttgaaataattatataatgtagaaattaattaggttgtttttatttataaggtattggaaattattttttttattgttgtattaaaatttattgagggattttagaattttgatttttttatggttaatcgtatgattaattgggattaattaatttttaggtggggttttagagttttttgagattttttacgttattgaaagttattttttgtgtgtaaagtggttatattattgaatttggtattttgttagttagattatagttttgattttggatggttataggtggtttttatagatatttttgtgattattttgtaaagatattatttattttatttgagaaaagaagatattaatttttttgagagtttattatttatggtggatgagtagtagtttggtatgtgaaataaagtttttgattttaagtaaggtgtgtttattattaaaatattttttgtgtttgaattagtaatagtttatatattttttagtttttttgagttttaattgatttatttataaagggagattgttgaatttgaattgttattaatttgttatttttaggatgtagaatttttttttgatttttgtgttgttattgttgttagtggtttttatatgttattttgatgtgtgataatgattaatttgatgatttgggatagttttaggtatggtaattttgaggtttagagttattattggatatttagatttttttttagtatggtaattttgaggtttattggatatttagattttttttttaattttattttttgttttttttttttttttagatattagtggaaattttaagttttttattatatgtttatttttatgatgtggtttgtgttatcgttttggttttgtttttgagtattatggaatttagtaatatgtgtgtgattttttttttttatatttaggtaggatggtttttgtattgtgttttttttttttggttttgatgtttttttttggtatggtaaatgttttggagagagttattagatgaattagttaattagagaataaaatattagtaggtagaaaatttgaaagttgattatttgtaattttttatttttttttttttgaatggttttgagagatttcgttaggaatttaggatggaaaagttagtatagcggagtaatatgttatagggatattgtaattttttttttttggaaagttttttgtattatgagataatgatatgttattaacgagttatatttgttttgtttttattaagaagatggattgaatggtttttaaagattttttttgagttgtaatgatatggtattatttgagttagaatgttattatttataaatattttgagtgggtatttggaattatttgttgggtttttttttttattttggttgtgtttagagaataggtttggttagatttaaatagattttatattttgatagagatcggaatgtttattgatgaaaatattttgtatagaaggattgttggtgaggtagaagtttttagagagttttggatttttatgtggtttatgtggttaattataaaatcggaattttaaaagtttttataaatttataagataatacggtcgggcgtggtggtttacgtttgtaattttagtattttgggaggtcgaggtaggtggattacgaggttaggagatcgagattattttggttagtacggtgaaatttcgtttttattaaaaatataaaaaattagttaggcgtggtggcgggtatttgtagttttagttatttgggaagttgaggaaggagaatggcgtgaatttaggagacggagtttgtagtgagtggagattgtattgttgtattttagtttgggtaatagagcgagattttattttaaaaaaataaaaaaaaattataagataatataaataatggtttttaattatttgtgtataagagtagttattgtatattattttttttagggtggataaggttgaattttgatgtagttaagaaatgtcgtaagttatagttttagtttatgtaattttagtttttgttaaaattttttttgatgaatttttagttatatttatttataaaatattttatattaagaatataatatttataatagttaaggaaatataagatttaagaaggttttaaaatatttttagttattacgtattatttaaagtatattatagttagataaatattcgtattatgttatattttttgtagataattatggtgaagaatgtttttggaggcgaaggttgtagtgagttgtgattttattattgtattttagtttgggtgatagagtgagattttgttttaagaaagaaaagaaaagaaaataatgtaatttaaagttatgtaaagttatttaatattgttttttttttgtgttggttttgtataatttttttttttgatgatttttattatttataagaattttgaaatgaaattgatatttgtttttttaaagatatttttttttttatggttgaataatattttattgtgtatatgtattgttttttttttttttttttttttttaattatattttaagttttgggatatttgtgtagaatttttaggtttgttatataggtttatatatgttatggtagtttgttgtatttattaatttattatttatttatattaggtattttttttaatgttatttttttttttattttttattttttgataggttttggtgtgtaatgtttttttttttatgtttatgtgtttttattgtttaatttttatttatgagtgagaatttgcggtgtttggttttttgtttttgtgttagtttgttgagaatgattgtttttagttttatttatgtttttgtagaggatatgaatttatttttttttatggttgtatagtattttatggtgtatatgtgttatattttttttatttagtttattattgatgggtatttgggttggttttaagtttttgttattgtgaatagtgttataataaatatatgtgtgaatgtgtttttatagtagaatgatttatatttttttgggtatatatttagtaatgggattgttgggttaaatggtatttttggttttagatttttgaggaattgttatattgttttttataatggttgaattaatttatatttttattaatagtgtaaaaggatttttatttttttatattttttttagtatttattgttttttgattttttaatgattattattttaattggtgtgagatggtattttattgtggttttgatttgtatttttttaatgattagtgatgatgagttttttttatatgtttgttggttatataaatgtttttttttgagaagtgttgtttatattttttatttattttttgatggggttgtttgatttttttttagtaaatttgtttaagttttttgtagattttggatattaattttttgttagatggatagattgtaaaattttttttttattttgtaggttgtttgtttattttgatgatagttttttaggtatttttattgtttttttaaattgtttggtatttagtttttttttaaagttttttgtttttgtttttgttttgaggtatagtttcgttttgttatttaggttgtaatgtagtggtgtgattttagtttattgtaattttcgttttttggatttaagtaatttttttgttatagtttttcgagtagttgggattataggtatgtgttggtatgtttagattatttttgtatttttagtagagatggggttttattatgttggttaggttggttttgaaatattgatttcgtggtttattcgttttagttttttaaagtgttgggattataggcgtgtgttattatgtttggttagttggttttaaaagtataggtggaaaataattgttggttatattgaaataatagtatgttttttttggatgaatatatttgaagaatataattttattagttttaggaaaagtatattaaagttataatgtattttaagggttttaggatttgttttttttttttatttcggtagatatttatatttgaagatgtttaagttattgaagtaaaatggtgtggtatttgtatataatttgtaaatatttttttatatatttaaaattatttgtatattatttataatatttaatattgtgtaagtgttatgtaaatagttgttatattgtattgtttagggaatgatgagaagaagaaaagtttggtatttgttgttttatatattttttttaggtattgtatttatattttataaaaagataattagtatttttatttattaaataacgtatatttgattttaaatgtaagtttttgtttagttttcggtgttattatgttaaattttttggatatttatattataggaaataaaataatgagtttattttttaaaagttttatttagagaagatgaaatattttattagtttagtttatttatattattttttttagttttttaggatttaataattaaagtttaaatttttttgtatgattttttattttatttatttatttttttaattagtattatttgtgaagattatttattttgtgttaggtacgttgttatgtgttagagagttaatggtaaatatgtgttagggatagatattatcgttaaagtttttttaggttggggggtatatgattattaaattaaaataatatatataatttgtatttgtttattgtgtgatagagtgtttggggggagaagtgtagaacgttatagagtaagtaatagagagagagagttgtggaagttagggcgtgggggttagggaaggttttttggttgaagtcgtattttttttgaagaaaggatagtatgggaaggttgggtgtttggaggtaggtgtatttttttttatatggttaaatatttgttttttgtagaattttattaaatgtgaaatatttgtagaatatagagagattttttttttggttaatgaaaagattgttgaggatattttataatatttgaaagaaattttatttatgaataataaatatataaagaaagttttttttttgaatttttttaatagattttttattttgtagagtagttttaggtttatagtaattgagtagaaggtatagagaatatttatatgttttttgtttttattatgtatagttttttttattattaatattttttattagagtgggatatttgtgataagggatgaatttacgttggtatattattattattagggtttatagtttatatacgttttatttttggtgttgtatggtttatgggtttggataaatatataatgatttgtatttatagttttatttattgttttaaaataatttatattaagtaggatataaaattgtttatttagggttatagttaattatttgtagtgttaaagtattgattggtaaagttaaggtttatggtgggttttttgattgatttttattttaaatgtttagttttattgttagatattagtttggtatgtattttggaaattgtagattgattagttttttagttgttttatgtcgatatttggttatgttgaaggaaatgagtgagatttgtttttgttttttttttttatatggtgggatttagagaattagtttttatttatttttatttttttcgtgtgtgttgtttttgtatgaatgatgtgttttttttatttgaagtttttgaagagttatttttttttaaggaaaaattaaaaggttagaaatgaaaagatttggaaaatgttattgaaataacggttgggtgtagttgattgaatttatataaattttttgaaagttagattgattagtatttatgtttgatttagttaaattaataaaatataggatgtaatttttatataattataaaagttttattgtttaattttatttggaggttataatgatggttttagaggtaaatgtgtttttagtttaatgtattttgattttttatttttgttggttttaagttagaataagattttattgtaaatattgttattttatttttgttgttaaatggtttaattggtgaaggttattgtaatttgacgaaggatttttgttggggtagggtattgaaatatattggatttttgtatttttttattgtttttttgtttaaagagtattatatgtaagtaatataggtggatcgtgatggggtagtatttggtttaaataaagtggttagtattaatcgggggtttattggtatttttgatgttagtgggtagggtttttagaagtttttagtagagataaatagtatagtatatgatgattgatataggtaaaagtatagaacggttgtaaaattttggtatgggggtaattattttaagaaaaataggaaatttagaatttaaaaaggaattatggatgtattttgagggtaaatatatatgtgaatgtatggatgcgtgtatttgtgtgtgtgtatgtatataaaatttttttgtggaaaaattttataaataaatgtaaaagatgaatgaggggtttgagaatttttgtaatagataaatgattattgaatttaagtgatattaatagttgttaaaattgattttaaaaatggtgaataattcgtaattagataaggtaaaagagatagattatttacggtaaaggaaaataaatggttagttaggaaattaaagtaaaaatattaatattattgtttatttattttgttggtaaatgttgaaaaattgtttttatttaaggaaaaaatagaatggaaaggtatttttttattgtaagttttatttgtattttagtattgttaaaatattgtattttagtatttttaatattaaatatttttgagttttattataataagattgaattagttagtttagggtgagtattattcgttgtgagttgggagatattaagtttaggattatttttaaattgttaaagataatataatggtaaatgataataaaattatattaataataataaaggattttttaaaaattttgagttaaatattttgataaatattttataaggattatttttttaattattttaagtagtttatgatatgttgtttttattaattttaaaaaattattttaattataataattgtttatgtatgtttgttattgttttaaatatttttttgtaatgatagagttttttattttgtgattagtagaaaattttgtttgaaatgaaaatgttttgtttaacgtaatgtattgatattaatttttaatttaaaataggttttgtggttattggttttttttttattttgatgggtgtgtataagttaatggtatggggagtattgaattgtaggaaagaaggagagttggtgtggggtagggtaggagggtttatatttgggaaggggaggttgggtagttgaagataatttttgttgtattttttgtgtttttgttgttgaagtttggttatttaatatatatagtagaagggaataaaagaaagttaattaaggtgtgtattagtttgtttttatgttgttaataacgatatatttgagattgggtaatttataaagaaaaagagatttaatggatttatagttttatatggttggggaggttttataattatggtggaagataaaggaggagtaaagttatgttttaaatggtggtaggtaagagagtatgtgcgggggaattgttttttataaatttattagattttgtgagatttattattacgagaataatatgggaaaaattcgtttttatgatttaattattttttttagggttttttttatattatatgggaattgtgggagttataatttaagatgagatttgggtgggaatataattaaattatattaaggtgtgttttgtatagggttttttaggattttaattttttatttttgttttaattaattttttgatatttgttaaattaaaaatattatttttagagataaaattttgtgtaatgaaaattttgtaatttattttttatttatttgatttttttttttattttttgttttattttatttatttgaattgttgttattttaatatatggtatttaggattgttggattaatttttatttttttttttaaggttataaatttggaaatttttttaaaatcgagtgtgtattttgtttttttttttatttgtggttttttttgttgtgttgtttattattgaggttaattattggttttgttattttgtatattttatttggtttttttgattataggttttttaattgtaaaatgaataaatgaagtttatgttattttgtgggatgattatatggggtgagtattaaaatattaaggtatatttttgttatatagatttggttattataataataataatagttaaaggtgtattgtcgcgttagtgatatttttgttaatttgttgataatagtttttgtgtttatttttggaattttaggtaatagttgttatgtttatttttggaattttagttatttttgtatggttttagaaatgtgttttttttgtgaggattaagagttgtttttttttgttaatgttttatagataggtaaagaggaaatatggaattttgtttttagggaaaaatttagttgagtaattaagatatagataaaataaagtatattatttagtaggagagggtgtgataaaattttaaagaggaatttagtaagtgtagaaatagttgagggttttttgattttatttagagataaggttttgtttatttgtttaggaaaagaaatatttagaagggaaggaggttttatttgtgtttatgttaaggattttagtttaaggagtagaattttattgatttgatttaagaagatttaaaattttttaattaagatggtgttgaaaaagatttttaggaattggttttgatttagtttttaaggtttgaggttgtttattttagttttgagtttttttagaaggtgttttattgttttttattattggttggggaggagtttggaatatttaagttgaatttaggatgtgtttagataggtgtcgtttttggaagttttggtaggagttaattttgtataggggaagtaggggaagttttaattatgaaatttttttagtatatagttttaatatttatttttttttagttttaatttttaataatttttttatatatttaggattttagttaattttgtatgaatttatatatcgtgtaatatgttgaggttggttgttatgtaggaagttttttaaagttgttttgttttagtttttagtttttgtatgtttaatgtttggtttttgttttttgtagttgttatattgtttatgattattttttagttagtttggtttttttgaatttttagtttataattaagttaatggttttttttataaaattttagttttataaaagggtatgttatgtttttttatatgtttttttttaatattttatttttcggtaatttaattacgtttattatttgtttggtattggtttttgtttaatttaattatttatttgatgtaatttttgttaaaaattataacgaattttattttaagttgttcgtatgcgtttttagttttagattttattgtttttatgggggatatagatgtggggggagagatgagggtttagatgtggacgtacggaatttagtaggtggtaggtaggtttataggagattggtttaaattttaagaatgtgtaggaattattgggagttaaggttggttaaaattttaagaatgtgtaggaattattaggagttaaggttgagaagaagtaaaaagtagggttatatgttagagaggttttatagttaaagtatttatatgggatcgagattttttaagttaataatttttatattgaagaagaagattgttaattttatatagttgagatttatttagtggtttgggggggattttataattaagttattattgggaagggatatatttagatatgttattggtagtggatgggtaaaatgtggtatatttatgtagttgaaattgatagttaaaaagatgaagtattaatatatattataatgtatatgaagtaagattgttgtagtatttagtattaagaagttagatatatattgtatgattttatttatataaaatgtttagaataggtaaatagataaagatagaagtagatttagtgtttgttagggtaaggtaagtagtggggaagatagaatgggagtgattataaataggtataggtttttttttgggttggtgaaaatgttttataattaaatagtggtgttggttgtatagttttttgaatatatttaagttgtataatttaaatgagtgaattttgtgaattatattttaataaatttgttataaaagtattttttaaaagatattttttggtttaattttttttttttataattgtaaatatatattattttgttttgttaatattggtattttttatattaaaagtttagacgtttaaatataggaaatgggagattttgttttatttttattttgaattttagagaattagaggttatgatattttagttattgggtgatggtttttgttagttttgttatttatttcggtttagtataatttgatttaaaagattttaattagagaaaaaaaaaaattattaaaattttagttatgtggaatatagtaattttaatgtttaggataataaattatagtataattttatttatttatttatttttttgagatggagttttttttttgttgtttaggttggagtgtaatggtgtgattttagtttattgtaattttttttttttaggtttaagtaatttttttgttttagtttttttagtagttgggattataggcgtgtgttattatatttagttaattttatattttttagtagagatagggttttattatgttggttaggttggtttcgaatttttgattttaggcgatttattcgttttggttttttaaagtgttgggattataggtatgagttattacgttcggttttaaatatttgttatatattgagtgtatttattgttttatttagttattttagtggtttgatgtatgagatattgttgttaggtttgttttattgatggataaattgaggtatggggatgttaagttttttgtttgtaattatatgttttgtgaaagagtaagagaaggttttttacgtgggatttgatgtagtttggatttgtgtgtttgtttaaattttatgttaaattggaaggataggtttggtgagaggtaattggattatagaggtggatttttttttggttgtttttatgatagggagtgagtttttataagatttgatggtttaaaagtgtgtggtatttttttttttgtttttttttttttttttttgttttgttatggtaagatgtgtttgttttttttttgtttttcgttatgattgtaagttttttgagtttttttagttatattttttgttaagtttgtagaattgtgagttaatgaaattttttttttttataaattatttagttttaggtagttttttatagaagtgtaagaatagattaatataagattttttttttaattttaaatttttatttttgtaaattggttgagattaaaagtatttataatgtttaagttgtaaattttttaaaattgttgattattggcggaacgtttagtgtttatttatttgttttattgtttaatatattattaaagttgttttagatttttttttattttagatagtttagaatttttagtattttatatgtttttgtttatattatgaaatcgataataaaatgaaatttataaatatattttttattattggaagggaaggatagtaggttttgtaagattgggtatttgttaaaatgtaaatatttaaaaattatatgtataaattataattttaaattagaaatttgtgtatgtgtagttttttaatggattaatattttttttttttttttttgtagaataatggttttttggtttggtgttagaattataagtaatgttttaaggtacgttttttatatttgtatgaatggtgtaaaaaatttttaattttggaataattatagatttatagtaagttgtaaagatagtatagagaaattatatatgtttagtttttattaatggttatattttaagtaattgtaaataatattaaaagtataaaattgatatgtatgtaatgtatgtatatgattttgtgatatttattatgtgtaagattggatttacgtagttattattgttattaagatgtaggtattaatggttttatatattattgtattttattgttgtttgtaattttttgttaaaaaatattaagaagaaaatgttttttggttagattagagaagatttaatgtattttatttatatttatgttattttgtatgtattttggtttttttgtaggaattgttggttaaataatttgatttttttattaaagagttttttttttatttttgagtattttttgttgtatattaaagtattataaattttattatgttatttatttatatgtttgatataatataatttttattttaattttaatatattaaaatttttgttttttaaatatatatatgatggtattttagttttagtttgaagtaggtttcgtaattaggttatgtaaatgagtaaagtttataaagtttgttaaaaatattggagtaaaattttgggattataatagtgttttataaaatttattttatggatattatttttagttttaaaatagaagtatattttattttataaataataagtaatttaaggaatatataataattttgaaatagtatatttatgaaaaggattattttgtgaaaggttttttaaatatatataataaattattatagaataatatttttaaattaaaaattttgttttaatgatgtatttttataattatgtttattgaatatatatgagtgttattttaaaatagaatagagtttttacgtgaatgttaaataatttgatgaagataagttttgtttatttttgattgtttagatattaggtaggaatgaaatgtttggttacggtttatttattttttttatgtaatgttttaagtatttgttttgtttagatattttttggtattgattatattaattggtttttaattggaattttagataatttttttatgttattattttagataaagtatataatgttatgaggttgattaaattttataagtattttttttgtgtagtgtcgtattaatcgtgtattataggaatgataatttgttatattggtaatattttttatttaagtatttattttttttatattttattaagaaattattttttgtagatttataaggaatttgattagaataggtttatttgaattattttaaaattattgtagtgaaagaaatttgtatattagggattatagatggttaaattatattttgtaaatgattaattaaggttgttatgagggattttgaattttataaggaaagaaagtaattttttttgttagaaagtaaaaattaattaataagttataattaagtttaattgaaattttggaatatattataaagttgatagaaattgaagggttgtttttaatttgggatttttgggaatttttgggaatgaattttgtttattaattagagtttgatttttttggatgttagtatgattggatatttgtgtagataattataatttgtattttttttgggatttatgaagtattaggtgggtttttttttttaatgcgtaggttaataaggttattggtaattcgtagttatatagttattagttttataaatgggaaaatttaggtatgtgtatattgatgatggttttgtaattatttaataaattagtagagatatatatatttttgttttttatattgtgttttttataggttaataattttagaaattagtttgtataaatatagggagagaaaagttagaaaatttagaaaagttagaagtagtgttaatgttataatttttcgatgatgtattttaaaagattaggtttgtataatgttttttagaaattatatattttttaattatttttggtgattatttgtaaagtttgttagttttttttttagagtttttgtggaatagattttatttaattattttttttatttttaatttgttattttttttgtttgggatgaatttaagagtaattcgatgggttttttagtttttattttgattttaaataattatatttttttatggttgttggaaagattttttaaatatataagtggtattatattgttgtttattttaaatttaatgatttattttcgttttatttagattaaaatttaaagttttattttgatttttattggttgttttttgattgtttgtgttttgtttttaattttgatgttgtttttgttgtttgttggtttttcgagatggagttttgttttgttatttagggtggagtttagtggtgtaattttgggttattgtaatttttgtttttcggatttaagtaatttttttgttttagtttttcgagtagttgggattataggcgtttgttattatgttcggttaatttttgtattttttagtagagatggagtttttttatgttggttaggttggaagaaaatattttaattgtagagattcgtttttgtgttttatttgatttcgggtatgttgggttttatataatggaattagtattatgagtttaagggtttttagtttttgtattatttaattttagagaatatagaagagtgtttattgtttagtataggtttaggttagtggtttttaattaagggtaatttttttttttaggaataattgttaatggttggaaatatttttgattgttatagttgggagtgaggagttattggtatttagtgggttaaggttagggatgttaataaagaatttatattgtatagaaaagtttttttatagtaaggattatttggttttaaatattagtaatgttgagattgataaattttggtttatatatttgtgaagttataaaagaaattaagagtatagtttttagtagttttattttatttatgaaagaaaataaatgtgtagtttattgagtataaggtatgtgttaagtatttttttaggggtttattatgtttaggaattttgattgttattatgtattttgtaatattggtgagagagattgttttttgtttgttaatttggtttttttttttttttgttaatcgaaagtttattttttatttgagtatattgttattttgtgttaaatatttatatttttttaagttttattgtttttaaatatggttagtaattaattttttgtttaagtggaattattgtgaagaaattttaaaatgttttttttaaagggaattgatttagttagaaaatgtatttatttgtttttttttttttgtttttttttgttttttagagggtatattaatggtaggggttttagtagtttttttgggttatgaggtatttttgaggatggagtttaggttgagaataattgataagaaagatagaaggaatttggttttttgatattgtggggttttatattagttttgtatatgaagaggaaatatttttttattttgtttaagttattgttattttatattttttttgttttatgaagatggaattgtgtgtgagtgaaattaatttcggttttattttggaatgattatttttatgttatagatgtttagaaaaggtgggtgatttttttataaagttattttattaataagtattagtaaattttttatataggatttgaattgagtttcggtggaattaaaagttagtgatttttttattgtatattttatatatatgaagttttatagaataattttttaaaagttatgaaagattttttgtttaatttagtggttgattgttttgatgtattaggttttttttttttttttttttttatttttatagttattgtgaatagtgtaattttttggtaaaattgtgatttaattttagtaaatgagttatatttttttttttttgtttttatgtttttgttgtttggtgggaagttagaaagatatagtttaaagatggtttatttttttgatttagttttatttagggatatatagtagattttcggagaaatagattttttagatattttttcgttaaggtgatttttttttttttttttttattttttatgttgagagaatatttaatttataagaatgtggtatgtttttggttattttagaataaattgttcgtaaaattgatatttaaatatagttttagtttcggatgatttagggtaaattatttatttattaatttagagacggaatttcgttttgtgtgttaagttggagtgtagtggtatgatttttgtttattgtaattttcgttttttggggttaagtagtttttgtgttttagtttttttagtagttgggattataggtatttgttattatgtttagttaatttttgtatttttagtagagatggggttttgatatgttggttaggttggttttaaatttttggttttaagtgatttgttttttttagttttttaaaatgttgggattataggcgtgagttattatgtttggttaagttttttaaaatatattaaatttattttaaaaagatgtttttataattatttatttttagtagtttaattttagtagtaagtaagtaataagattatttatttttaattaagaaagtaaatatatatttttggtataaaaaataatgtattttaaaaattttatttaaatatgttttgtaaataatttttattttaatttttttttttttagtttaagttatattaaatattttttggaatgaaatattattatagtaatgtaaaatatattgataaaacgtgatatatttttattttaataatatttttaagttggtttaattttaataatgtatattatttttattttattttatttgagatggaatttcgtttttgttgtttaggttgtagtgtagtggtatagttttggtttattgtaattttgttttttaggtttaagtgattttttagttttagttttttgagtaattgggattataggtattttttattatgtttggttaatttttgtatttttagtagagatagggtttttttatgttggttaggttggtattaaatttttggttttaagtgattcgtttattttggttttttaaagtgttgggattataggcgtgagttattatgttcgatttattattttaagaatttatttttattaattttttttttaaataataaattattttatgttaaatataatgtaaattagattttatttttttttatatattataatgttgtggttgtttagtttttttatttatgtttttagtttaatattttttttaaatgtattttatttgttcgttttaatagagtttgattaattttattttagtagatatttattgagtatttattatgttttaggttttagtgataaagtgatatgaagggtgaatttggtttttgtattaattttttatttttttgtttattgagaaaatttttagatattgttattttatttatttttaaaaatttatgtaatattttagtttggggcggtggtttacgtttgtaattttagtattttgggaggttgaggtgggtagatgataagggtaggagatggagattattttggttaatatggtaaaattttatttttattaaaaatataaaaattatttgggtatggtggtgtatatttgtagttttagttatttgggaggttgcgaaaggagagtcgtttgaattttggaggtgaagtttgtagggagttgagatttagtttggcgatagagtgagattttgtttaaaaaaaaaaaaaaaaaaaaaaaatttatgtaatattttttatgagtttttattattgtattaatggggatataattatttttttttttttattttgtttattagagtatttgtgtatttttagaatttatttttgttttttttttttgttaattttataattttaatttttttttattattttgaagtttttttgtatttatttattaacggttaatatgtgaattatttagtttttgttaggttttgtttatggttttaaggtttaatttttatgttcgtaatttatttggtattttgggatggaaatatttgatgaagaaagagaaaattatttgagtgagttatagatatatggattttaggattgattatgttaagagttagatggttttttttagtaagggaatataggtgatatagattattgagattattgtttgtatgaaggatggagagaagaattttaaagttagagagaatatttaggaatatttagtgtaatttttttattgtgcgttttaggaatttgaggtttgaagtaatgatatatttagttaaagatagtttttagtttagaggaaatgtttatttttatattttattttttattgtatgtaatttttttaaaagtttatttaggaatgatttggagtatttgataggaaatttaaatttatgggtaagatgttttggtgtttagttatagtatagagttaaaatattgtaatgagttatgttaatatttatgttttttagtggttttttttggtagaggaggataaatatttttttttttatttattttatgtttatgatttaggtttttttaatataagatagattaagaagagaaaaatttgtaaatttatttagtaagatttatatgttgtgggagtttttttaaataaatgaagattttagtaaatggttaattttgtgtatttttatagtagttttgatgaagagtgaatattgatggagagatatgataggataaaaagggtgtgatttagtgtagataaattggggaatttagtaaggtttgtttgtttaggtttttttttgtgattttttatttttagagatgagtatgttttttttttttagggatcgggaggtttttatatgagtgttttttgatttgttttttgggaatgttggaaaagtttttttaagttgtatgttttgtatcggggagaagtatatgtgtgggtgaggaggggaggttagagagatttttttgtttttgtttttttaatatgttaaggtgtcgtattttgagtagtgtgttttgaattttattattttttttaatgtaattttttattaaatgtagtgttttaggataagggttagtaaatgatttttaaaaaaatattagatagtaattatttttgtttttgtagtttataaagtatttgttgtaattatttaattttgttgttgtagtataaaagtaatagtagaaaatatatagattaagaagagtggttatgttttaataaaatattttttgtagatagtaaaattttaattttttgtaatttttatattataatattttatttattttttttttaattattgaaaatgaaagaattatttttagtttattggttttataaaaatagatggtaatttggatttggtttgttgttgtagtttgttaattttttttttatgatattatatttatatagataaaattaaatttaaataaaataataaaaatgtatttttttgataatataaagatatattttaaaatatttaaagttaaataaaaatggatagtttttgatatagtttatagaatattgtttgttaaattgtagggatttgaaataatgaatagtaaataatagtgaaaaaaaaattttaaataaattatagttaatttttgaaaatttagtgttaaaatgtgatgattagagttaagaaaaattgtgaaagatttgaaaattggtaaaagtaaagattatttttttttgtattgtatttttttaagttttgtttagtgtttagtgttttgaattatttttttattttgtaaatggtagaaaattgataatgaaaataatttttgtttatgaaaatgtaaatatattttgtttagtggaatgtatttgatgttttatttaggaatataatattttgtatatatttgtaaatttattttagtattagtattttttattgattttatttatttatttatttattcgtttatttatttatttatttatttatttattttaatttgtttattatttatttgtttattgtttatttatttatgggattttttttttgaattaaatgtaatatatgattattttttgagttaaataaaatttttggtatatttttatttgatatttgtatgagttttgtttttattttataaaatatttttttattttgggagtttaaggtaggtggattacgaggttaagagtttaagattagtttggttaatatggtgaaatttcgtttttattaaaaatataaaaattagtcgggtgtggtggtgtacgtttgtaattttagttatttaggaggttgaggtaggagaattatttgaatttaggaggtggaggttatagtgagttgagatcgttttattgtattttagtttgggtaatagattgagattttgttttaaaaaaaaaaaaaaaagattttttttttaatttttagtttagagttatgttttaaaattttgtatttaataaataatggtatgttatttagtaataattatttatttgtggggagtttgtatgtttatttttttgtttttgagtgttagaatttattggtttgatttttgttttttatttggtttggagtgtatgtgttgaaaagtggtaatttagggtttagttttggtgttttggtttatagttttaattttagtgggagtttagtttttataagggtataatttttaattgttagtgattttttagttttatttagaattacgtttagaggtgaggaagattggttttgtttgtgtaaaaatttggatagttttatttgttatttgtgaaatttatcgagtgagggttaaatttttgaaatatatttgaatatgattgtggaaatttttgttttgtatgagatgttttttgtgatttatgtggtaatgattgtaaatttatagagtttaaggaagatattttttaggagtaaaatgaaaatttagatatatatgaaaatgtattatgttttagtatttaagaattaaaggtgaacgttttttatttgattgtaattttaatatgtagtggattaaaattttaaatgtttagatattttagatttgttgtaatatttattgatgtttatataatattttttgattttatatatgatatattttaagaataatgttgttgtttattaagtatttgttgtttaatttattgattttttttggagtaaataatgattttatagttaaattacgtttgataatgattttaggagaagtgtaggtttgtgtaatttaaagagagagatttgtgtagaaaatgttttaagtcgggtataattaatttttttttattttggatattaatgttattatttttataagtatatgtttttatttatatgagattatgtttttattttttaggagaaaataaatatgatgtgagaataaatattagaagagataagagaaatattttattatttttttaaattaatattttggttttaatatttgtgtagaatgtatgcgaaaagaaattgttagtgtgtgtgaggttttaattagtgtttttttgaaaaagttattttatgtataatattatattagtatgattaatataaattattggatgtaaatttttttaattgttttatagtatgatgttataagataattataagtagttttggcgttttgtgtttagtaagatatgaagttttttttttttttttttttttttttttttttttttttgttttttttttaaagttttattgtttatatagaatttgtttggtagtttttttatacggatgtgtgtgataatagggttttgttttgttgtttaggttgaagtgtagtggtattatttcggtttattggatttttgattttataggtttaagtaatttttttgttttagttttttgagtggttgggattataggtatgtgttattatgtttgggtaatttattattattattattattatttgtagagataagattttattatgttgtttaggttggtttgaatttttgagtttaagttatttgtatatttcggtttttttaaagtgttgggattataagtatgagttacggagatcggtttgaagtttgttttaagggagttgatggaattgaaaattaagttagggttggacgtgtggtatgatttataagtaatttatttattgttgttttagaaggatattaaagtggttattatttttgatgtaaaggtagaaatggaaagaaaaaagaagagaaaaaaatgagagtttgggaaaaagataaaaaaagaatttataaatagttatataaataattagttttaaaatattattttttaaatggttaggaaatagttttgagatttttgagaaattattgaaggtttttagtagggttttttttagtgataatgtaggtggatggatgagttaatgatttaaataattagagatttgttgtaaatttttatttgttattgttttttggaatgtagatttatagttttaattggagtttttagtattgaaggcggtatgagttggtgttattgatttgttttttttgattattgttatttttatggtaagcgttttttgtttttacgttgagaatttttattaaatatattagtgtgtatttgggtgattattagtttgtggtagttgaaatattttaggttattttagtttagaaattagtttgtttgttgaaagaatatgtaaagttttttgttaagttggtatataattaatatataagggaaagaacgggtttttatttagatttaaatttaatatgtgataagttaatagtttagtgtgtttttgtttttttatgttaattttacgggtgtgaaagatttttttatttgttataaattttaaaggaaaaatatgcggaaggggaaatgtattttcgtgtaagtttttttttaattttttacgattaatttttttttttatttgatgaaagaaaatgtaaacgaaattttttatttggtttatagttgaagacgagttttataaagttgtttttagaaagggaatttgttttgaatatatgaaaattatttgagttaagatgtattatatggtgattatagtttgatagatgttttgaagttgtaatgtgtttattagaaagtacgtagagtagggatgagtatcgtttgtttgaagatgttgaggtttattttggtaattggaaaaatgtattaatgttgattgaagtttggggatttttatatttgagaaaggagatagaattggattttagtttttggtagattagtatttgtgggtattgaatatgagattgtattatgttgttttatttttgtcgtgatagttattgttaaaatattttttattggggtagaaaatttttatttgaatttaaggggggtttatatttgtttttttatgtttataattttgattttattttatacgtaatcgttggaatgaggtttaagtttatttgtttttcgaattatatataggagttttttttagaaaatttaatttgtgtttgtgcgtagtttattttggaaattttttatttttttgtgtttttgaaagagtagttattgtaggaaaataaatggaggttttaatttaaattcgatttttattaattgggtgaatatagaaatttttgttgttttatttgtttgaaaaagagaatatagattaattgtttgaaattaaaataatttgttttttttaagagattttttatttatttaatggggaagaatttgttttgttttataaataatgatatttaattattttggtatatttattttttaattaatttaggtttaagaatatttttgtaagatttattatttaaaatatgatgttttttgggtaattagtgtgtgtgtgtgtgtgtgtgtgtgtgtgtgtgtgtttattggattatattttttgtttttttttgggttggaaaatgaaattacgttttttgaggaggatttttgttagatatttttttttttttatttgatgtatatttatgtaggaagtgggttgtttttttttttaatatttatgtatttatttatttatttatttattttagataaatgtttgttaggatttttaattttatagtgaatgttagagttaatgaaagttttgttagttatgaagtgataatgaagtataagtaaagttattaggtatttggaattttttaagtagtagaatatgaaatttatcgtattttggtggtattaaaagttattggagagagatagtatttatatttgtttgatggatgtattatttttaggtgttttagaatttatgttttgattatacggttaagttatgtttttgttattttaaatttttttttaataaatggtttttgttgaatggtaagttgttgtaatgtaatatggatgataattttagaaattgttttataaatttagtcgttggggttgttttaagaaagttgttgaggatattggttttttatgttatgttattttggggaggaaatttggagagatattaattaattaattatttaatttttttttgagacgaagtttggttttgttttttagggtggaatgtagtggcgcgatgttggtttattgtaatttttattttttgggtttaagtaatttttttgttttagttttttgagtagttgggattatagatgtttgttattatattcggttaatttttgtatttttttagtagagtgggggtttcgttatgttggttaggttggtttggaatttttgatttgaggtgatttgtttattttggtttttaaagcgttgggattataggtttgagttattatgtttggtttagagatatttattttgattgtattattagtattaattgtgtttttttgagaaatgggtagatatttttggtttatggatattgtggattttgtagttaatagtgttttttttttataattggtttttagaaagttaaaatttaaattaaatagtttgtttttaataagtgtgttgaaattgattatatgtatttaggaaatttgttttatttttgatagtatttattttttttttattttaatttttttttattttattttttttttatttatttaagatgtgttttttagttgtaattatatgtagttttgtaaattgttttgaattattttaagagtgagaaaggttatagataaatgtatatatttataaaataataaatcggtagaaggatattatattgtggttgcgtatgttgttagatgagttgtttagttttttgaatttttttatttagaattttatggttaaataaaatgaagtgataagatatttatatttatattaaagtttttttagttgagaagtgatgattatgggaaaagatttattggaaaagagtaatgggagttttttgtaaattaggtaatggttgtaattgagtaagaaaaatttaagagaatataatttaaattatgaaaatagggagtgcggtagaaatttgttttgatgggaaatgtggtagtggaataaaggtggggcgtttttgtttgtgtgggttatgggagttagaggggtttggttttgtttttatagattttaagttataaatagtagaggttaaagaatcgtttttaaaattatataataaagaaaggattttttttaattgggtttttttagagtatagttattaatgtgggtaagtttattttttatttgtgtgggggaaaatgatttaaagtgtgtattttgtaaattttgttcgtgtatttttttttttttttttttttttttgtttttttttttttttttttttttttttttttttttttttttttttttttttttttttttttttttttttttttttttttttttttttttttttttttttttttttttttttttttttttttttttttttttttttttttttttttttttttttttttttttttttttttttttttttttttttttttttttttttttttttttttttttttttttttttttttttttttttttttgtttaattgttttttttttttttttttgtttttttttttttttatttttatgggtggtaaatgtttatgttggtttttatgaaagattttttttttgttttaagttataggagttttagttgaaaattttaagtatagagaggtataatgaatggtttttggtttatttaacgataatggaatggttattttgtcgatattgtgtttattatattaatagtaatagtttagttggtgttaatgtgtatatttttgtgtgatgataggttgaagaaaacgtagggtttaaataggaaaatgttgttgttggttagaaaattgggtttatgcgaaattgtttaattaaattatatttattttaatttattgtaagtgattaattttgtgttaaattttatataaggagtattgtttgtagggagaattgtgagagtcgtaggggttaggataatttttgaattgtgtaagtagagattatttaagagttgagttgtttgtagatgtatttagatttagttttttgtagattttttttgtggggttggaacggatttttgtggagaggagaagcgagttttcgagattttttttggggacgtagtttttttggttttcgtttgttgaggaaggtgggttttttgatggttgtaagttttcgagtttttatagttgaatggttgaatttggttagtcgtagatgaatgaatagtgttttttaagagaaattttataatggtttcgggattattaagttgtgaagatttatgttttcgtgtttgggagtgtgtgtttagtaattttttttcggggaaggcggggggtggggggtaggtattcgaggttggttttttatatttaattgtatgtatattttttttttttgtatgaggaaataatgtttgtattaaggataatttttttttttttttaaatttttttataaaaagatatttattaaggttggtattttgaagaattaaatgtttttttaattttattttatttgttttagtgagtatagtgtatcgattttggggaatttatattacggtcggtaagtagttttttttattttttaggggttttttgggtatagaaataatttttttttagaattttttgaaaaagtaattgaattatgtaggttaattaattgtaaattttagtttttttggatgaagtagtattaaaaagttttttgatgatcgggaagttttgttgtgaaggttttttaaagatagtagttttaagatttaaggtaaatttgttataagtgtaattgtttgttgtgtttttacgtttttgaatgttgttttattttttatatgtattttgtgtattttttgtttgtttttttagtttgttttgaggtagaaaggtaataattttttttagaatttttgttttttggttggtaatggttatgttataagtagatatgagtttagatagaataagtatatggggaggattttttatattttttttgaattattttttgcgtagttttagtatagtatttgttaggaaaaagtagtatagattagaagggtgatattttttagtttttgcgtgtatcgtgttgaaatttttagtgttataatattagttgttattttgttgagaggttattttttgattcggataaaggtaatattagtttgtttgtattttgtttggatttgtaggataatgttagttatgtattcgtagtagtagtataaattaagttttaagatgatttaaagaatagaattgaagttttttttttataattattataatttaaaggaaatgggggtaatggcgttgttttttgatatttgggaggtagagtaagaattttatttttggttaaggaaatattttttttttatttgttttgtttttgtaatatatgtagatcgttgtagtatttttgtttttttagatttaattttttattggttatttttgatttaagattttatttaaatttttgatattgatgtgttttgatttaaatggatattttttgtcgtttgagtgagaggtataatagagtttggtttttgggtattagtgttaaaggttgaagggatttattagttttattatttgggtcgagttatttattagtgttttttaaatttgtatatttttttggaattattaatattaattaaaagattaatatattttaagtatttaagttaaaaaatttaaaatttttttttatcgtttttcgttttttatttttttatttagttgtttgtaaagtttttttgataaattttttaaattgttttgttattttttttgatattattgaagtatttattatttttaaaatgtggtaattttatagttttaatttttttttttatttttgttttttatagattttaaggttttaaagtttgtgttttttaaattttagtatgtttaagaatttcgtggcgggtttgtttaaatgtagattttcgggttttatttttatagattttgatgtggtgtgtttgggttggggtttgagagtttgtatttttaagaggattttagtagatgatggttcgtggtagttttaatttataggattatattaaatttttggtatattttttagtattttttatattgagtttttatttaattttttagatgattttgtttttttttgtgtgtgtgtatttttttagggtttattttttttttttttattagataatttttttagattttttagtatgttatatttttttatatttttttgtttttgtttgtagtattttggagaggtaatatagcgtggggatgaagagtaagtggtaagtttgtgattattaaaatttagtttaggaattaattagtatattatggtttttttatttaggggttatgtgattttgagtaagtgattttgttttgtgtatttcgattttgttatttgaagaaaaatggggtagataatagtaggggttattgtatagatttttgtgatgattaaacggtttaatgtattttacgggttttgaatagttatatagtatgtgttaaatttttttgttgttttttttatatttattatattatttgttgttttagttttttttgtgtatgtgtgtgtgtgtgtgtgtgtgtggtgaaattttcgtttttcgaaaaaagttagattttatttttttttttttttttttttgtagttttttttgatatttatttttttttagttttaggattaattgattaattttttttgtttgttagttatgatttgtagttttttgtttatatattttttgtaggtagagtttgaaattattgagttttggaaatttattatttttattttttttttttagtttattttttatttgttaagttttaaatatatgttatttatgtgtttgatttcgtgtttgcgaagggttcgtttgggtgatggagtgttgtgtggggagtggattggatataaatttagttatttgaattagaaattttaaattttgtgtttttagaagtgtatttttaattagtgtgatttttttatttttttattttatattaggagtaatttgatatttttattatttttggatttttttttaaatatgttgatagtaattttggtttgatttttggttattattttaatattttatatttggttaggatttatagtttgtaaagaattgttatataaatgaatattatttgtttttaaagtatttttttgagatgggaatggaaagtatttattttttttgattattatgtaaaatgttggatagagtgatttttttaaagttttgtggttaataagatgtggggattatagaatgggttttgatgtttttggagattttgaaagaggagttttaggaaagtttggaagatagggggtagattgtatgttatttgaggaaagtgtggaaagggagaaattttatttcgggtatggttttttttttttttggtagtgtggttatgaggaagagaaaaaagagggaagttaggttttgagaggttgggtaattttttaaacgagatgtaattatatttttttgaaagtacgtaaatatttatttttatattttattggtttgtattgatattagttttttttgttatatataaaatatttaggtaaatatattagtatagtaatggaaaagttttttttttatttttgtagggttttgttattggggtttataaatttaatgtataaaagatattaataggaaaataaggtaaataaagtttatttgatgataataattttatatgtatagggattttatagaaaagaaataaaaatttaaagaagtggttagatttagaagtttatatattattttaatgaagggtaatatattgtggagaggagaatagataaagaaaagggggttttgggtttcgggtagtaaattgtgggaaagtgatttagaaatgtatggtagataaggtttgtttattaaggtttgttatgcggataatatgagttatttttttttttttggtatggaagaagggaatttttttataaatggaaatttatattgtttttataaaggggaaatttatgtttgtttttaagtagaaatggggaaggtagagagttttttttgtatttattgttttttaattgtttttagtttaaaataatttttatgttaaagtagtatattttgggatggtatattttgatatttttaattagggaatttgtattatatataatttgattatatattatgagagttgattagtgtttagtgttagagtgagagaatgacgggaagaaggagattattggatatgagttgagagtagtgtttttagtgtggaaggtgaaatgagtaggtgtttttatgttatttaagttgtataaaataggagaaataagtatagttgattagattgttttatgtttttttgggatattatttgatcgataattttaaaatttttttttattaataaaaatattttggtttaaaatttttattatagttgtttgtttggaaatttaatttgaagaaatattattgaaatatgttgaagaaagttagtgttttatgattattatttttttttaataaatagttttttttttattataaaagtaatatttttattttttattgtggtaaaaaaattatattatatatatatatataaaatataaaatttattattgagagttatgattatattattgtagtttagtttgggtgatagagtgagattttgtttttaagaataaataaataaataatttaaaaattaaaaatttattatgaaagtttttttttttttttttttttttttgatggagttttattttgttatttaggttggagtgtagtggtgcgattttggtttattgtaatttttgttttttgggtttaagtaatttttttttttgttttagtttttcgagtagttgggattataggtatatattattatgttaggttaatttttgtatttttagtagagatggggttttattatattggttaggttggttttaaatttttgattttaagtgatttatttatttgggttttttaaagtgttgggattattgagttttagtatttataatttagttggttagatttttgttatttaaagtgtggtttatggattttgtagttttagattatttgagacgttgttggaaatgtaattggtgagttatcgcgtttagcgtgagagttatttttgagtgtatagttaagtagtgttaagtatatttatattgttgtgtaatagattttcggaatttttttattttattaaattaaaattttatatttatgaaataataattttttattttttttttttttagttttcggtaattattagtttattttcggtttttatgaatttgattgtagaaataatttttttgtaggataagatttttttttttttttgtaagaaatttttaaaggtggatattataagtataaataatttaaaagtgtgaaatatttgattttgtgtttttagaggtttaaggattttaatatgtttatttatagggatttttgtaaagaaaattaatgtaattattaattgattttttttattttataattattattttaatttttttttttatgaattcgagtattttgagaattttatataaatggaattataggatatttattttgttgtgtttgttttattttttttagtatgttttattttttaaagtcgatttttaattttattattattatttttattttgagttgttgaattgaaggttggtaggatggtattatttttagttttttggttttttgagttggataattatatatatgaatttatgattttataattgtttatttattggaaaggttttttgaatttaatagatgtttgatagtttttgttttgtaattaaagttgtttattttgttttttttgggtggttgtttatttaggggaatattttttttgtagattatatgagtcgtggagtttgggtgtttttatagtaagtggtgtgtgtttttatgatggattttttttatttgttttagtgtttgggtaatttgtttatgtgtttgtttttttagatcgtttggtatttttttgggaaaagaggttgtggattataattgttggggtttacgtgaattttttaaaaggtagagtaagtttttatttttttttgtgtttttgagtattaagattggttatgtttagtaaagggaattgaagtttagagaatgtgaaatgggcgatatatataggttggtttaggggtttttttaagtttttttaataatttaaggaagtagttgttattttttttattgtataatgtagataattgagggttagaaggaataatggataaggtttttaaaatttgttatttggggattatattgtaggattttttgtttttaaagtttatgttttttttttatattttaaatttttgtttttggtattagaaattgagtagattttttttttaagtatttggaaaggaaatataaaatttaatttttttattatattgaatattgttttttttagattatttttttatatgtagaattagaaatgaagatattggaatttttaggtatttggggtttaattttttttgaaatttttagggatattgtttgttttatataatattttttttgaatttggatttattttgggattttaagtaacgtataggattttttaatttaatatagttgttttattatgataggaaattgtttttattttttaaatgaaagtgatagttattaaattgtttaatgtgtaggatgaatttttgtaaatatttttttaaaagtttttttgttttggtttagtgtttaatgagggaagtgagaaattattagcgtaggtttgtggagagtttgcgggttaggttatttttgttgtttgtgaataatttagattttgtttgggtggggtaagtatggcgagtttagtaggaatagtttggggtggttatggttgttaattttttaatttagttttggattttataatttatcgatatttgtttattttattattttttttttgggtggtaggaatggatataaaattattgtggtagttttttttttttttattttattattatttttgtatttttttatgttttgttaggttatgagtttttttattgttttgagttaaaggtagtatataaataattatgtgtaaataaaatgaaagtttatattgtttaatatatgtttagtttttttagaggaaaaaaatatatatatatgtatgtaatttaaattttttaatatattttttaattgttgtatttgttttcgaaaaataattttagtaaattttttttttaaattttaatttttttaattttgtgtgggtatatagtaggtgtatatatttatggggtatatgagatgttttgatatagttatgtaatgtgaaataaatatattatgaagaagggggtatttattcgtttaatatttattttttgaattttagtaaattttaaagtaatttcgtttagtatggtagatattagttatatttattatttaagtttatatttatttaaattgaatataatgaaaattttttatttttgtagtttagtggtttttaattagaggtgattttgtttttaaggggatatttggtaatgtcgagagatatttttagttgttattattagggaagaggtgttattggtatttagtgggggcggttagggatgtagtttaatacgttgcgtggtagtgttattatgtatagaatagttattatcgtaaggaattatcggtttaatatgttaatagtggcgagagtgagaaattgtattagttatattttacgtgttgagtgttttaggtagttagaaattgtaatattggatagtattaatttagagtattttttattgttattgttgatatttggttttattaggtagtgtggttttaggcgagagggaaaagttaaggaggattgggagtagggaagtgatatttttatgaaaatatatttttttgaatgagatattatagattttagatttttttgttatagataggttttgttttaagtttttgaggttatgattgttattgaagttatattattagtaatagtatttagttgtttgtggagtattttatgatcgataaatggtttgttataaattgttttatttaattttgtaatattgtaaaatagagaagttttttgtttattataggtgagaaaagtgaagtgatttatttgtttgttataataatgtgtaggatgaatttttgtaataaaaaatgaatatatttaaaaaagaaaattggttagattatgatcgtgttatatgggtggagtttaggtttttatgtgatagttagggatttttataaatttataaattatatttttatggggatattttattaaagaaaagtagaattttatttttttttttttatattttaataggatttattgatagatgatgtgtttttttttgatatgtattaagttattttattttttatatttgggaagattattttattttgattagtttatataaataaagataatataatgtatgtgttttagtttttttttagtttttattttaaaaagaaaatttagggatgtgtttaagtagttgtatattagttatgttattttggttaaatgaggtaatttggagagaaaattaaagtatataatattaaatgagatatataggaatttaatattaaaatttagttttttgttggttttataaataaaggtggttagttggttatttgggttagataaaagagaaatagttaaaatgatattttgtttatagaagtaaaaaatatatgatatatcggataaagaaaatgtatatgtatattatagaatattatgtagttataaaaatgaaaaaattatgttttttgtagggatatgaatggagttggaagttattatttttagtaaattaatgtaggaatagaaaattaaatattttatatttttagttataagtgggagttgaacgatgagaatatatggatatagggaagggaataatatatattggggtttgtcggggggtggggtggggggagggagagtatttaaataaatagttaatgtatgttgggtttaatatttaggtgatgggtcgatacgtttagtaaattattatggtatatatttatttatgtaataaatttgtatattttgtatatgtattttggaatttagaataaaaataaaaattaaaaaaaaaaaagaaatataaattaaggtatttagagagagattttttttaataatttttatattggattgttgagatagtagtattaagttttagagacgtatgaaatggtttttttatatttaaatattttaatgattgtattgtattagtggttaagatttatcgttttttttagttttatttgtaatagaggttgttgttgttattattttttgaggttttattatgtatttgggtggattgtttttgtatattgttacggagggaatgatttttgatgaaatggtttttatgttttttttagagtaaaggatttgaggaaattttttgagatgttgtttttttttgttgagcgtggtaggtagtatatgattagtttatgtattattatatgttttggtttaaaaatgatgtttatggaaatgtggaatatattatgttataaaatattttggagtttttttttttttttttttttttaatgtttgaaaggaaatttgtgttagttgagaggtgttaaatttatagttttgggattttgtaaagtttattttttgtataggatgtataggagtttagacgaattagattttatttttggattttttttattggtttatataatgtattttcgattatatttgggaaaaatgatttttttattaaaagtgggttgtggaaatgaggatttgttgttatattatatgaggttgattgtgtggaaagaagatagggtagaaggtagggtagagaagatttggttaggaggtaaaatatatatttatatattatagtttgtttgagaaaatttatttggagtttttttgtggtttttggggttttttatattttaggggtgagttaggaagttatatgtgtgaattacgaattttatatgaatgggatatgtgtatttttttatgaagtttttagttttatgtttattattttaattttttgtttttttaagattttaaagtaagcgtgtttaatttatggtttttgggtcgtatgaggtttaggacggttttgaatgcggtttaatataaatttgtaaatttttttaaaatattgtgagtttttttgtaattttttttaagtttattagttatgattagtgttagtttattttatgtgtggttaaagataatttttttttttttagtgtggttcgggaaagttaaaagattggatatttttgttttaaagagacgataaagtaattatattatttaacgggtaatatttgttattttaaggagtgatttttattttgtttgtgaaatttgttgattttataagtttgacgttattggattatagaatcgttaatataaatagtaaaatagattaagtaggtatttttttatttatttttaaaaaatatgaatttattaagtatagttttttggggaaaagttagttgagattttgaggaagtgttttttgtattttttatagtagatttgtatgttgattttgcgttttatttttttattatataaaagtgaaaggagttttagattatttttatgttaaaaagaaaaaaaataatttagttaatgagttttttattgtaaagaaagaagttaaaaggttgttatatttggtttataaggttttttttgggagttggggaagttttttttattagtgttatttgtaatatgatgatagagtgagtgtttgatattttgggtagagagagatagtaaagtaaatttgggataaagagtttagtgtgggtggtaaattattttttgttgaagtcgttttgtttgtaaaggtgtgaagataatatagttttttttattgtttttgttttttttttgttgtttttgttttttaagtatttgtatttatggtggttcgattttatttatatgttaattataatttaatttggaaaatgaattaagtattgtttttgttttaatgaggggatatttatttaacgtgattatttaaaaatatgagttgagttaacgtttcgaggtataataggatgtataatttattttttaaaatttttaaaatttagattagtgagtatagatagaaattaggagttgtgtgtgttgtaggggagttttttagaattgtattgttgtttatgttatgttaaatttagaaggttgacgttttattaggttgttttggtttttttgtttaagttagggtatatttttttgagggtatttggaaaaattttttagttttgtttgattgagtttttttttttttataaaggttgtagttggggcgagtagatattggtaaatttgttaagttttatagttttggatgttttggaagtagcgttatgttgtataaaattgtttgtaagtttgtggaaaagaataataaaagcgttattttagatgatattagtaagtaaagaaaatagttaaattttagtatggtttgttaatttaaaagttatattaaattagttgtttgtcgtgtatggaatatttagtgttgtttattaaaataatgttaaaaggtaaatttatggtgatatattaataatgttaaaatataggttttattttaatattttgttatattatttttatatgtttatatttaaaaatatttgatataataaatgattttaatgtaaaatttagttgtttttttttatagtttttttttatattatgatgtgcggatataaagttgaaagtatattgatgatgtttaatattagatggtatttatttagttatatgttttttggataaagttttaatttttttattgtttttgttatttttttgggttttattttttttggagaaattaagaaaatgtttttttaattgttaatgtttttttttatttttgttttttgttttttgaaataatataagtaatagttatggttttttgttttgttagattagatattttttaattgatgagattttttgttataattaggatattattagtgtttaggtcgaatattttagttgataaattaatagattcgtgagtttttttattggttagtgaggagtagagtgcggagggtgttttttttttagtattttatttaggagataggagataagtttttttgtttttttattttaggggtttttttaaatgtagtggagtttgttagtaatgaaagatttatatgttgggaattagtgtatttttggttattgatagagataataatattgattttcggttatttgataaggaaatttttttgtgtggttcgattttttattgttttaagttaatttagggggaattggataggtagattagggatttttatgtatagttttttgtattattagtagggtgtttttagtattagattatggaggtagtttatatgtaggggttattgaaggtttgatgttttttgttataaaggtgggtttgtaagtttttattgtatgtagagtgggttttagtgttaatttaatttgattttagaggagtggtgtggtgtaaatatgattggggtgtgtttgtgtttgtgtgtgtgtgtgtgtgtgtgtgtatgtgtatgtgtgtatatgtaaagttagttattagtttattattgtgattttttttaggaagagattttttaatgaaatttaagaaaattgggaaggaggtagtttggggatatgttggttaaatgatataaaattttagttaggaggagtaaggttaagaaatttattgtataatatggtggttatagttaataatgtattgtatttcggaaaattattgaaagagtagattttgagtgtttttattataaaaaaattaatatgtgaagtaatgtatacgttaattattttaattattttataatgtgtatatattttaaagtatgttttgtataataattatatatagtttttatttgttaattaaataataatttttttgaaagttaaaaaagaaagtaaattaatttttgtcgttggaatttttttatttatggttttgtatatttgtatattggttttatatatatattatattattgtatattatgtatatggtatatatatatattatatagtatatattatatatatagtatatatataatgtatataagattatatatatatatatatatttatatatataatatgtagtattattatgtaaattatgtatagatgttgttttatttgataaaagattgtaaggtattatttatatagatatagatcgtgtttttatggagtagaattagtatattaaatatagaaggttttaagaaagtaaggaagttagtgtttgtttagttaatatatatggtattatatgattttgagaaaatagggtattatgttaagaaagataggagatatgaattattgtaaaagttttttgaggatatgaatttttgaagagtcgggttttttagttaaagagaagagtacgtataatggtattgaggtggaaaattatttggtatttatagagaagtttaagaagttgttgtattatgataggatatttggcgatagggttttagaggattaagttttttatattttgtataaagtgtagtgatggaagttagagaggttgtaaggaggggaatgatttgatataagatattttggggaatgatgaagaaggttgagaatggaaagcgggagtttggttttaaaataaatatattaatttagatagaagaggtgggtagtttatttaggtgaggttgtagtgaaggtagggtgaggcggatggatttcgggagatgggaggtaaaattggttagggttggatataagaagcgagggagatggaaatattcgttttgatgttagttttttaggaaagtggggagaaaggttagttatttaggtgaaggcgattggaagaggagtagtcgggtttttttttgtgtgaaaaagggaagttttgttaaaatttattttgggtataataagtttaagtttgtgagattatattaaggggagttattaaataggtaggtggatatttgaagtttttggtttagaaatagttaggattagagatgtaaatttgagttgtttagaattttatggtatttatggttatttaggaaaatttttgggtaagtttaatatttttgtgtgttgttgggatttttttagggtttggttttaggagtatttgtagttgttttttttaatggtaattaaataagcgtggttggagagatgaggattggtattttttgaaatgttggtttcggtgagaaggcgatatgatggatgttaggtggtatagttaattggaattagaggttgaggaatgagttaacgttaattttaattttaattttcggttgtatttattattattatttttttgttttttttttttttaaaataatgattagaaaaataaaattttattttgtaggtttatgaggttttaaaaataaaaggaaattatgatttttgtaaatgttttggtatattttaggtattatgttgatagatattttataaatttagggaaagaaggaaatgatgagtttagattttgatgatggggaattatttttgaattttttttttttttattttatagatttatagatagaacgagtatatttttaatagaattaattatatagttttaatatattttgtgggggagggttagaatttatgaataaaaaagatagtaaatgttttttttattttttttttatcgtttatttattgggtaagttatttttatgttagttgtatttggatgaaagttatttaagagtatatgtaaattggtgtgtttattttatttaaatgatggtaagataattaaagtaatcggttttgtgtgtttgttttttagaaaatttttatataggattttaaattgtgttttttttttgatttattatattattttaatttatttattttttttgaaggattgttaattttaatatagtttttgtaattaagtgataaatttttataggtattatcgttagttaaatattatgtatgagattatttatattatgatgtatatatataatagtatatattattaattatgtatataagaatattaagtaatttgagatttagaaaataataggttatttttttttttagtagttttgggtttgataaggtattttattttagattttgtgaggtttattggatgttgaatattattagttatatgatgatttggagtggaaaatgaagagtttttatgtttttttttttttttttttggtattttttttattgttattttgtattagtgtgatatatttgttataattgatggattattatcgatatattattattaattataatttatagtttatattggggtttatttttgttgttgtatatgttgtggtgtttgataaatgtataaagttatgtatttatttttatattattttatattatgattttttagttttagaaatattttgtgttgtgtttggttattttttttttattttatatttttggtttttttgttgtttttataagagacgatatttttttttttttttttggttattttcgtttagttataatgaaaggatttgttgtgacgttttgagggaggaaggtattattaagtgtttttttaattttttatatatagagttagatatttttaattattgagagatagttttgttttttttgattttttgggtaaaaggtcgttaggcggtagagagtagttgtagataagtaaggaggaagttaaaaaggagagtgatttagaatttttattaggttttggagatttgatcgttttgatattgtgattttttttttttattttaaattttttgatttaaagtcgattagttaaacgatgtgtttgtggttagaatagtggaaggttaatggtttttataggttgatttgttttttttgggttagtggtattttggaagttggtattttgtatttttgttgataattttaattttggtattatagacgtggaggtttttattgttattgttttaatttagtagattttatgtgtgttttaatttataattgtaaaaatgtggaattaatttaaatgattattagttaatgagtggataaagaaattgtgatatatatatggtatatataatatagtattttattatatatatatatggtattttattatatatatatatatatatggattattatatatatatgatggaatattatatatatatatggattattatatatgtatatgatggaatattatatatatatatgtatgtgtgtgtatatatatatatatatatatatatatatatatatatgatggaatattatttagttataaaaaggaatgaattaatggtatttgtagtaatttggatgagattagaaattattattttaagtgaagtaatttaggaatggaaaattaaatattatatatttttatttttaagtgggagttaagttatgaggatgtaaaagtataataatgatataatggattttgtggattcggggaaagggtgagaagggggtgagggataaaaggttataaattgggtttagtgtatattgttcgggtgatgggtgtattaaaattttataaattattattaaagaatttatttatgtaattaaatattatttgttttttaataatttatggaaataaaaaaaaaatttaaaaatattttaaatacgtttgatatttgatattcgttagtattttgtagttatttagattttattgtatttttataaaatagttatttttttttttttattatgtatatggggaaggtaagagtgataagattttaatttagtttatttggttttataatttatgtttttagtttttttatttttttaattttttatagttatatttttatttttttcggttaggtaggatttgggagaatgttttttaaaaatatattatttttttttggtattgggttattaaattttttattttattttattttattttattttttttaagaagtaatttttatacggttgatgatattttatttttagtagattttatagggtttgaaatgaataaagggtgtgtgatttatattatagttaatatttcgttttttgtttattgtgtaagtttcggtttatagtggtttttattttttggaattttgtttttttatttaaaatgtggagtgatttgatgagatggttttttttgtttttgtttaaaattaaggatgaagttttaaaatttgaatgaagttcgtatagtggtgtatatttttaatttcgggtattttggaggttgaagtaggagggttgtttaagtttaggagtttgagtttatgttggttaatatagtaaggttttgttttaagaaaataattaattttttatttttattttttcgtaaaaaataaataaataaataaataaaagttttatggaaattagagaagagttttatttgtttagtacgggaaggtttgaatatttagttaaattaatgtaaatttaatttttttattttttagatttgaatgttgtggtgttagaattttaaggagaaattttagtagttttgagtatttgatgggatagttttgggtgaaagtattaggaggatagagtttataatttttaatatttatggagttttatattatttagtttaagttatgggtaatggttggtttaaaaatgaaatttttttatagttaaattagtttagagtagggtatattttttttttggttatttttattgttgatatttggtgtatttgtttggggtagtttttttttatggggtgatgttgtttgggttttttttaattttattttggggtatataaggtgaagtgagttgtgtgagagttaaaatttttagttatgaagaagtttggagacgaggaggaaatgtaaagttgaaggggatttattagcgtcgatgttaatgtttatattttggatggacgttatagttttatttagtataaaaatagtttgtttatttttgttttttgggtatgtggggaatgtggagtattttttttttgaaggttatttttgtgtttgagatattattttatgattttggggatatattaatttagtttttttagtgtttattgtaattaattaagaagatgttttaatatattgaaagttataacgggaaaatttataatgttgtagattttatgattttattgtgtgtgtatatgtatttatttttttttaggttttaggaattttattttattttttattatgatatttatgatatagggaaaataatttaatattggttggggagttgttgaattgataatagtgaaaatgtaaatatttttaatttttttttattttttttattttttttataatcgtgttattttttagaatttgttaaatataataaaggggattttttatattggtaaatatatattaaagattatataataaggttaaaatttgggatttttttttttttttttattagtattatatttgtttttagagataggttgttgttttgttatttgggttagagtttagtggcgtgattgtagtttattgtagttttgaatttttggttttaagcgatttttttgttttagttttgggattataggtgtatattattatgtttagttaattaattttttttttttttgaagagataagattttgttatgttttttaggttggttttgaatttttggggttaagtaatttttttgttttagttttttaaagtttaagtattataggtgttggttattaagtttggttttttttttttttttttttttaaaaaatggggtatggaggatttggagtaaagaaatgttaacgttttaaatgttaaagaatattatttaaagtaatttgttttgttaaaataattatggtggatattgttattattattttttaagttattgaaggttaatttaattgattgttttattttttaatattagtaatttatataaaaggagaatttaaaaaatgtttaagtgaattgggtttttaatattttagtatttgtaatatttatatttatattgagtagttttaataatgaaatattttgatgttttagagtttaataattgtttttatgagtatgagaaaagtagtatatatttatttaaaatacgtaaagaatggaaatagttggagggaaaaaatgttatttatatatttattatttagttattagtattggatagtattattttttattatttttttttaagattagaaaagttttttgtattaataagattttttgattagtgattgagttagggagtgtaatattttatttttgaagtataattttgtgatagattagtttgggtattgttaggtatttttttttttatgtagttagtaatttattttttgttttaaggtagagttttatttttttatttgtgtgttgttattatggatttatgggttttgaagtattgaaatgggttggaatttatttttattattatttgttttgatatttagtttgttaaggtttgatttgtggggaattttgaagtatattgttgcgttcgttggatgagtgtttgttattttgggagtacgtttcgtttttgtagtatgacgggatgttttaggtttgttttgtcgtttttttgtttatgtttgagattaattttattttagaggggttttggggacgttttgtttattattttgtgtgtttgtttatatagtgtttataagagagttttgggggagacgatatgtataaaaatatttgtttatgcggatttgtgaaattgtgttttaaaagttataattattgagttttttaaaaagagaaatggtgttagagaaagaatgtagaagagtttgtgatggaggtagagatattatcgtggttgttttttttttttgttttttgtgtttgttgagattttattaggaggagaaatttatttgtagagatcgtggggtatttttgtgttagtaggttttttttttaatttatattttatttggttttagttttgtaaattaagtttattaagggagggtgaatttgtttatggaaaaggtttaattgaaagggtaaaggggtgtgtgtgtatgtgtgtgtgtgtatgtacgtatatatttattttgtagtggttggaatttttgtattgttgttttagaggttataaagtattatattaaaaaaaaaaatttttggtcgggggcggtggtttatatttgtaattttagtattttgggaggttaaggtgggcggattacgaggttaggagattgagattattttggttaatatggtgaaatttcgtttttattaaaaaaatataaaaaaattagtcgggcgtggtggcgtatttttgtagttttagttattcgggaggttgaggtaggagaatggcgtgaattcgggaggtagagtttgtagtgagttaagatcgcgttattgtatttcggtttgggcgatagagtgagattttattttagaaaataaataaataaagtttattttatgttttgggatatatgtgtaggacgtgtagatttgttacgtaggtaaatatgtgttatgatggtttgtcgtatttattaatttattatttatgtattagttatttattttgatgttttttttttttttatttttttgataggttttagtgtgtgtttttttttttgtgtttatgtgtttttattgtttagtttttatttataagtgagaatatgtagggtttggttttttgtttttgtgttagtttgttgaggtttttagttttatttacgtttttgtaaaggatatgatttttttttatggttatatagtattttatggtgtatatgtattatattttttttatttagtttattattgatgggtattggattgattttatgtaatgtaataattttattagaaaaggtggattttgggattagtggttgattggtggaaggaaagggaaggtatggaaagtttttgggtaggtatagttatttttttatagtattttatggattatatttagagggagttagtaggaaatataagatagaaatttaggttatgatgttagtaagttttgttttgggtaggttttagttggatttattggttttaattgattttagttagttttgttattttataagtatagggagttttagtattttagtaggttgtttttttttttatttattattttgtaaatttaagaatttttgttagttattggtttttttaatttttcggggtatagttttaataggagttagtaaattattgtttgtagtttaaatttgttttgttatttatttttgtatggtttatgagttaagaatgggttttgtatttttaaatgatgaaaaaaaaatttaaagaaatagaatgttttttgatatatgaaaattatatgtaatttaaattttcgtattttttattagtttgtttaggttgttgtgataaagtattataaatagttttgtttaaataatagaaatttattgttttataattttggagattggaagtgtgaattaaggtgttagtggggttggttttttttgagagggttatgagggagggatgagttttaggtttttttttttggtttgtagatgttttttttatgtttttatatttttattttattttattttattttatttatttatttattttgagatagagttttattttttttgtttaggttagtacgattttggtttatcgtaattttcgtttttcgggtttaagcgatttttttgttttatttttttgaggagttgaaattataggtgtttgttattatgtttggttaatttttgtatttttttagtagagacggggttttattatgttggttagattgatttcgaatttttgattttagatgattcgtttgtttcggttttttaaagtgttgggattataggcgtgagttacggtatttggttttttttatatttttttttttttatgtgtatttttgtttatgtataaatttttttttgttataaggagattagttattgggtgagggtttattttaaatattttattttaagtaattatatttgtaaagattttatttttaaataaggttatattttagggtattgggggtttaatatattaattttggggggaatatagtttaatttatgatagtattttatatgaaatgttattggagtatagttatatttatttatttttttatggtttgtagttgattttgtattatatcggtagagttaaataattttagtggaaattgtatggttcgcgaagatgaaaattaggatttgtggtgttatacgtagaattcggtgaaaaatgagaatgtaaggtttttttgaaaaattaagaatttgaagatagtgatggtaaagtattaaattaaggttgggttttttttaaatgtggggttttgcgtgattgtaatttgtttatttttgaagttatttttgtttaaaatatttattatttggttatttatagaagaaagtaaaaattgtgggttttgtattaagagtagagttgggagtgagattttgggttttaggggtattagtttgatgtaggattatagatgttttaggtttgagtgtaattaaaagatattaagaaacgaggtttatgtaatttattaaggattagtgttggtttagtttttttttttttttttatttttgttgagttttttgtgtttagcgtgtttttaatggttattgtagtttgttttattttattggagtgttttaaatttttttttttgtagttttttcgagaggatgtgtttttgtttgatgttcgttttttatagtatgttattgtagtatatgtattttggtagaagggttagttgaaacgcgatgttgttgtttttaagtttttagaagtaatagtgttaattgggattgtgattaattgtgtttgtttaggattattagggggtaaggattatatgggggttatggggaaggtggttttttattatttttgttatggttgtaatttttttaggttagttatagtgtttggatttgtagttaaatataattttgtattaaaattaaataggtagtagtattttaaaaagtttattgttacgggttgtattttgttttttttgtaaatttagatgttgaagttttaatttttagttgtttagaatgtgattgtatttggagttagggtttttaaaggggtaattaaggtaaaatgaggttattagggagggttttgattttataggatcggttgtttttgtaagaagatgaggatatagatatgtatagagggatgatttggtgaggatatagggagaagataatatttataagtttaggagaggggttttaggaggtattaattttgtttatattttgattttggatttttagtttttaggattgtgggagagtaaatgtttgttgtttataaattgttcggtttatggtattttgtgatagtagtttgaaatgaataagatattttataagaagaggagatgaggatatagatatatatagagggtcgattatatgaggatatagggagaagatagtatttataagttaaggagagaggtttttggaggaattagttttgtttatattttgatttttaatttttagtttttaggggtgtgggaaaataaatagtttgttgtttaggttgtttagtttatgggattttattgtggtatttttagaaaattgatttatttatttagatttttataattttttatttggttgttttgtgtattgttgtaatgtgtagtgtgttatttaaaaatgttttttattttgtattgttgtggtttttttgtttttttgtttgttgtttagtttttaggtttgtttcggtttgtagtattttttgggttattaaagttttatttattatgataaatatatattaaagatatgttatttataggatattttatatattttttagggtatgtatgtataggaagtatgaagtagagtttgtatttttaataagattatattatagttttgggttaaagtttatatgtattttttttttttaaaaattttttttttaaaattatagatagggttttattatgttgtttaggttggtttcgaatttttgggtttaagtaatttttttattttggttttttagagggttgggatgatagatatgagttttcgtttttggttatattttttggttataaaatgaggtgggttttagagttagtttggtaagttggttgattttgggtatgttattaaagtttatggtgtaagtaaaggttagtattaataatttattagggagaagtatgtgtaagggttaaatttgagtttgatgtttagttaggagaaggtagaggaatggggagaatataaataaatttaagttagttttttaaagataatgtttatatgtttatttgagatttttttgtgtgtgtggaataagaaataagtttttgtgtgtatggaataagatagcgttgtttagagagttgtttcggaagttattattagggatgggttttatgttatatgtaggaaggtagtttttttttttttatgttggtttttttgtgtttagtgggtgttaagttgatgtttgtttttgtttatgttttttatgatgttttagtgtatttttgtttatatttgtttgagaatttggttaaagtgtgaaagtgttttttttttaatttgttatttatttttttttttgttttttgtttttgtttttttttaaaaataagttgggcgtagtggtttatgtttataattttagtattttgggagattgaggtgggtggattatttgaggttaggagtttgaaattagtttggttaatatggtaaaattttatttttattaaaagtataaaaattagttgggtgtggtgacgtatatttgtagttttagttattcgggaggttgaggtaggaaaattatttgagtttgggaggtggaggttgtagtgagttaagattgtattattgtattttagtttgggtgatagagtgagattttgaaaaaagagaaaagaaagaaggaaggaaggaaggaaggaaggaaggaaggaaggaaggaaggaaggtaagtaagtaagtagggaggaaggaaggaaggaaggaaggaaggaaagagaaagaaagaaagaaaagtaagtaagtagggagggagagaaggaaggaaggaagagagtaagtaaggaaggagggagggagggaggaaaggaaggaagaaagaaagaaaaagaaagagagagagagagaaagagttttattttgtcgtttaggttggagtgtagtggtataattatagtttattgtagtttttattttttggttatatttaatttttttgatttagtttttagagtagttgagattataggtatatattattatattttattaatatatatatagatgtgtattttttttttttttattgagatagagttttatttttttgtttaggttggagtgtaatggtacgattttggtttattgtaattttcgtttttcgggtttacgcgatttttttgttttatttttttgagtagttgggattataggtatatattattatattcggataattttttgtgtatttttagtagagatagtgttttattatgttggttagattggttttaaatttttgacgtgattcgttcgtttcggttttttaaagggttgggattatagacgtgagttatcgtgtttggtttttttgttaattttttatttttgtagagataaagtttttttatgttgtttaagttggttataaatttttggttttaagtaatttttttattttagttttttaaagtgttgggattataggtgtgagttattgtgtttagtttgttatttatttttgattatgtttttatagtattttggtgtatgtttttttatttgtaaagtgagagtagaagaggtagttttttaatttaggtggtgtaatttgagggtttgtgaagatattttttagtatatttttattaaggaggttgttttatggttataattattttattcgaatttttgtgattttttttaaggtgagattgtttttgagagtaagtattaaatttatttatatatttagttttagaatgaatttatttatttaatagatagatatttattgaataattcgtaagtatttttggtatggaggttaaaaaatagatgagtttaatttttaagtagtatatagttttaggagggaaaataagtaataaagaggaaattttaatagtttgaaaatgttataagtgaattggtagggaaaataggagaaggatttataattttgggataaattaaagttgatttttgaggaagagttagttaattggaagcgtgggaggtggaggggtttggtcgtgtttaatagggaggttggatagtatgttataagaaagtaagaggtattagggtatatttgaggtattagaaatagttgagtttatgtagtagggtattaattatgttttttttatggtgtttgttaatatattgagtatttatagttttttttgttgtatttgttattttttatttgagaatttgtttatagtgtggaaatttttttattttgattgagaagtaggttagaggtattgggagttaatgttttcgggaattgtttttaagtgttaatagataggaggtagtagatgagaaatattatggtttttttgttatttgagaaggagaatagatttttagtggtttttagtgtaggtgatttttaggtatttagagtataaagtattattttagtgtattttggatttttttttgttttttgttttatttttttttttttttattttttattttaggattatgtaaaattagattgtgttaatttttgaggttaagagtatagttttggttgggtgcggtggtttatgtttgtaattttagtattttgggaggttgaggtaggcggattataaggttaggagattaagattagtttgattaatatggtaaaattttatttttattaaaaatataaaaatttgtttggcgtggtggtacgtgtttgtaattttagttatttaggaggttgaggtaggagagtcgtttgaattcgggaggtagaggttgtagtgagttggtatcgtgttattgtattttagtttgggcgatagagtaagatttcgtaaaaaaaaaaaaaaaaaaaaaagtaagtatagttttttaaattgttaagtatgtttaagatgtttgtttaattataagtttagtattttttaaaattatttttaggttttataatttgttaaaaatatttttaggatttattgtaggttattatgttaaggtttacgtttattatagggatatgatttgaatttgaattagttaaaagaggagtttatagggtagagtttaggggaatttttaatgcgaagtttttattgtttttaggatgtatttttatatatggtaggatgtacgaaatattatttacgtgggaagttatttgagtttaagtgtttagagtttttattgaggttttatgtcgtaggtatgattgatcgagttatgattcgtgtggttaaaattaatttttgtttgttttttttttatttttttggagattgggtttatattaattggtttggaggggttttattaggtgttttttaattagtaaaaattaataggtatggttttaggggtattatgaataataaagatatttattatttaggatattttaagtttagagattgttttttaggggtagggataatagatttttttttgagtgagattagattttttattgtatagatttttttagtatgtgtttggggaatttgaggtattggtttattgggggaatatatggttatttgagggtgaacgttaagagttttatatcgggagttgagttttttaagttatgtatggcgttgagaattgtgttttaaagagtttggattttgtagaatagggatttatgttatgtagaaaggtattggtttttatgggaagaattaatttgtagagatttaggaggtagggagatgggtaagaagatatttgtaatgattgtaataattttagtagaaaagtttagtaatttagacgaggatgaatgagtggtttagggtataaaggaaaatggaaagtttgttttaaaggatgagggtagtaaaggttttaagtagttggatggatagggtatggttgattcgtattatgaaaggtaggtgttttaaatattgttgggtaagatttataggtatgtttttgtttttatggtattgataagaaaattgaggtagagaaaggttatataatttgttaggtttttaggatattttataataaggtattttaatgtattagtttgtgtttttaattattattgttggattaaaggtagagaggtaataggtttagttttgttttgatatgaggaaggatttttttttaatttgatatatttgcgggaatgtagaaagatgttttatgaagtggagatgtgtaggtagtggttgggttagatattgtaggtataaaaattggggttttttttaattttttgattttttagttttatttttgatatttattggttgttatttttggtaaggtttaatgttcgtgtgtgtgataatggtgttgggtattgattttaggatttttggaattaaagaaataattttatagttttgtttattttattgatgttttgagggatttggattgaatgatatattattagataaaattattttttttagttttttttagttggggaattttttatgagagatgagtttgttttgtaattgttagagtttttgttaattgtattagaagtgttttataagataataaaataataatttgggggattttagattatttttagaggttagagttttgttgataattttagtttattttaataaatattgatgaatattagttatgttttaggtttttgttgtattgtggggaggaggagataaattagattaggggttggaaaattatttttttaaagggttagatgataagtgttttgggttttttgggatagagttgtttttgttgtaattatttagtgtgacgatgtagtatgattgtggtgatgtgttttaagtgtttttaattttagggtttcggatttttaatggtttatggtttgttaggaattaggttatatagtaggaggtgagtgttgggtgagtaagtaaagtttattttgtatttatagttatttattatggtttatattattatttgagtttcgttttttgttagattagtggtaatattaggtttttataggagtgtaaataaattttgttgtgaattgtatatgtgagggatttaggttgtaggttttttatgagaatttaatgtttgatgatttgttattgttttttattatttttagatgggatcgtttagttttaggaaaataagtttagggtttatattgattttatattatggtgagttttataattattttattatatattataatgtaataataatagaaataaagtgtatagtaaatgtaatgtttttgaattatttagaaattattttttttttttttatttagtttatggaaaaaaaaaatatattttataaaattagattttggtgttaaaaaggttggggattgttaatgtagttgatatagcgtgaaagtagttatagataatttggtaatgaatgggtatggttatattttattgaaatttcgtgtttggatattgatgtttgatttttatataattattaggtgttataaaatattatttttttttaattatttgaaaattaaatattattatggggttgtataaaagtaaatgttagagtggatttattttttaatgggtttagtttgttaaattttgaatgagatattcggtttttgattttaaggagttgatagattattttagagtagtgaatagatgagaaattatgttaatatatcgtattgagagtcgtagttatgggatagggaattatagggtgggttttttatgaattttgttttttggagacgttaaaggttttttatgttaaattttttagaaagtgtattgtttttatatttggtgaataaaacggagatgaaagtaagaatcgaggtttgtaaaatttgtgtttgtaaaaagatttttgttttattttagtttttatggtggtgaatttttagtagtaggttaaaaatatatttggttattgagataaatatttgtataggtgaatggaatagagatagatttttaagaaaattatagtttttttttttttttttatggaattttatttttttggagtagagtatagattgtttttgttggggaatattcgtatttaattttattggttgttttttggttatatatgtggtttgtttatattgaagtattgtgttagaattatttgtttttttgatatagatttatgggagatataagattaaatttggttttaagaattaggggaataggtttaacgaaggtagtgttagttttagttttggggttggatggtttggagttgagagtaaagatagagaaggatttgaggtttaagttgatatttatagttatgaattttgtgttttttaggattagtgttaagggatttagttggttggagggttatagttattttagttttggttattattgaattttttaaatgtggtattatgtttgttatttaatataatttaatatgaaaataaagttattggttttttttttgtaattttatgttatgttgtttttttttttatttatgtattggatatttattgaatatttattgtgtgttgaaagtttttatggattttggattatagggtgaaaagatagatatatattatgtttatatgaaatttttttttagcgtgagatagataaaaaacgtagtgagttaatttaagtattgtggttagtaaggagaattagggagaaaaattgagttagataaggggaattagggtttgaggagggtgtttatttttcgataagtaaggtaaaaaggttatgtgtatttgtatatttgagtagaaatttggaggaagtaaggtagagattgtaggtatgtggggaagtatttttaaggtggagtttataggatttgttgaaggattgaaattgggaggagagaggtttaggatgattttaaggatggaggtattattttatttattggagtagataataagaatttattatttggttattaggtttttagtttaggaatatttaatttaggagagtatttaagtaaaatgatagtgggtttatgtagatttgttttaatagttataggttgagttttatttttttttttatttcgagatgattaaatttaaagtaattgtaatgaagaggtgagtagatgataaaagtaagaataaaagaaatagattttagtgtgagtgagtgtgagtataataatattgaattatatttagtattttaagtaagtatgatggttgggtatagtggtttatgtttataatattagtattttgggaggttgaggcgggtggattatttgagattaggagtttgagattagtttgtttaacgtggtgaaattttgtttttattaaaaatataaaaattagtcgagtgtggtgttgtatgtttgtagttttagttattcgggaggttgaggtaggaggattgtttgaattcgggagatagaggttgtagtgagtagagatcgtgtttttgttttataatttgggtgatagagtaagattttgttttaaaaataaaaataaataaataaataaatttaattaaataagtaagtataaagattggtttggtttaggtggatagaggattggttatgtttatgtaatttgttggattttgtagaattgatgatattgattttgttttggtgagatgttatttttgtgtgaggtatgttatgaagaagagttttatgaaattttttaattttgttatggtgaggatgtttgagtattttttattgttagaacgtgatattttttaattttagaagaaaattatttttagattttgtattggggataattgtttttttaggttttttttatgtttttaatttatgtgaatatttgtattgtaggaattgattaagtttttttttttttgttgggaattaggaagttgaaatttaaatttgtggtttatatttagtgggtgttgaggatttagtagagtgtagtttggtattatattttttatagattttatttgatgtttttatttttttttatttttttttgttaatttttattttaggttattttgttattttttatgaatatgtgtattatgttgaattatttttaaaaataaaaattagaaattaaatgtatatgggaggttaggtgtagtggtttatatttgtaattttagcgttttgggagttagaggtgggaggatcgtttgaagttaggtgttagtgattaatttgggtaatatagtaagattttatttttataaaaattttttaaaaattagtgaggaaaaaaaattagttaggtatggtggtgtatgtttgtagttttagttattcgggaggttgaggtggaggattgtttgagtttaggagatgtaggtgttattgagttgtgattgtattattatattgtagtttgggtgatatcgtgaggttttgttaaaaaatagaaataaaattaaataaaaaattaagtaaataaaaaataaatgtatattaggttagtgttaacgatttttttgttttttttatttgttgtttaaaatgaatgttttttgggagtatattttagggagataggattttagatgtttttgattattaattgtggttgaaattttaggaaagtaaatgaaatgttagttaaattattaggtagataggagtttattttacgtgggtaggaaggcggtaatgtgtttagttttgtacgagtaattttttattttaaaatgttttattattgagtgattttgtggaagttagtggagagattttaatttgggaaatcgttttttgattttatataattttaaattttaaatgaggtttattttttagataaatttttgttataaattaggtaagattacgaaattgaagatatttggttatttattggtgagaatatagttttgaaaaaggatttttttttaattttttttaagtagtttttttttttttttatcgatgaggtaatagttttgttattttgttaatatttagttaattttatttaatatttttttttttaattttttaagattttaacgtatttagttttttttttagtgagtatgggagtattgaatagttttgggaggcgatttgtattggtgttaaggacgagggtatgggaaggttatttgtttttgattagggtgtgttttgtggtttgggaggtaaagggttatagtggagttatttttgaggttttagtatgggttaggttggagttttgttttttgtggtttggtcgtttttagcggttttagagtttttagggtattaggggattatatagggggttgtgtatttatatatgttattgttttttaggtatcgttttcgttcggagatattgtgtgtttttttttaggtgttagtgtagattaaagttatttaaagaatatttgtatgagaatttgtagaatgattaattagtaatgggtattagtaattttttttttaaggttttgaaatgttttttattgataaattagttttgttgagtttcgatttttttttaaaatgttttttatttagtattttttttgtgattataaattggattttgtttttttttgtttatattttttttttgattttgatttagtagtgtggttaaaaggatagttttttgtgggcgataatttatttttattagtttttgtatttttttttgaaatggagttttatttattttgttgtttggattggagtgtagtggcgttattttagtttattgttattatcgtttttcgggtttaaaagatttttttgttttagttttttgagtagttgggattatagacgttcgttattatttttagtttatttttgtatttttagtagagacgacgttttattatgttggttaggttagttttgaatttttgattttaagtgattcgtttattttggtttagtttgtttattttttttagatgatattttatagtaggatatttttaattttttttttttttgttatttttttgaaacgtttattgttgttttatttaatttattttttagttttgatttttgattatgttgtttttatttataaatatatgtgatttgatatgtttagattttttttttgattatttaagaaggttttaggatttttttagaaatagaaaatgggaaatgtattagtagatgtgtttattagtatattttaaagtaatggtttagtaaagtttagggatattgtagtgttttgtagttgtttggaaatgttaggagggatttaggagaattggaatttttagaaaaagttgtaagttttaagaggattatattatttatgggttttttaggaaattattataagtagtagatataagtaatattgggtaagttattgttaaatataaagtttgttatttttataggatttaggtatgtgagatgtaagtttatgtagtttaataaaaagaaaataggttaattttgtaaattttataatttgtatgtgaatatattttttgggttttttttagtgttatggaaggggtttttataagtgaggggttattttgaatttgattggttttttgggaaatttattgtaatttttagattggggtttagtaggttgttgtatttagaagatgtagttgagaagtggatgggatttgttggagtattattttatgtaggtaaaatttgagatgattgttattattgttgagaaattttaaattggggaatttggatatgttaagatttaggttgatgtaattttattgttgtattcgtatattgaatatttattgtttatgtaaagtgtttttggggatattgatatggataaagataaaagttttgtttttattgatataagaggataataaggcgtatggtaataaataaagtagaggaggagatgggaatggtaatggtaggttttatttttgtggattatgttgataagatggtttattggtgaatttttggggatgatggtgggttggttatgatgagatatatttttaagttttagttttgttattattaagatatattgttttagatatagttacgtatgttaattttttgggttataaaatttttagtagtaaaaatgggatttttttcgtttttatttggggttaataaattttgatattttgtttttttttaatgtttttatttatatttgttttttattattagagatgtagataatagatttgattttataatttatgaaatattttggaggttaggatcggtttttttgtgaatattttgggtattaaaggaatttgggtatcgtttttgggggagttgtagacgagggtagtgaagcgtatgtttagtggatttttattttttaatatttttttgtattggaattattttaatggaggttgataaaggagatgttgtttggggagattgttcgtttattggttttttatattaaagaaaaggtgtttaagtggttatttttttttggatttaatttttttttattaaatatttagagtgtatttgatgttggtagtgttttttaatattttataggattaatttttgtatttattgaataaagatattaacggaattatagaaagatagaaagtatatatgttaaaattggttatttaatagtatatgtggattttttggagatttatgaaagtattgttaaaataatattgttatttgataataagtgtaatttttatgatattatttttatgaataatagtttaaatataaagaattaaaaattaatataaataatttttaattttttaatttagatatagtaatttttaaatgattgttattattttagattagatttatggtaaatagttatttgagtgtttattgtatttttgtggtatttattttatttagttaaatttgtttttttagttatataataatttttatgtaattgtttttttttttttttttttttgacggaattttgttttgttttttaggttggagtatagtggtacgattttagttgattgtaatttcggttttttaggtttaagtaatttttttgttttagttttttaagtagttgggattataagtatttattattatgttcggttaatttttgtatttttagtatagattgggttttattatgttggttaggtttgtttggaatttttgattttaggtgatttatttgttttggttttttaaagtgttgggattataggtatgagtaattacgtttggttaattgttttattttaatatattatattggtttattttggaggtatataaattgttttttattacgaagattagtttattttggaagtattattttaattgttttgtttattaatttataatatttgtatagtttattaatttataatatttatatagtttataaatttataatatttattaatttataatattatgttatttaataaatttattggattttaaatgttttgtggagatgggaagttttgatgatattatttgtttttaatgagatgtttaagttgtatagagtatgttagggtgttgaaatgagaaattattaaaaggtataggtttaagatgtttttttggtttaaacgatttatttttttttttgttatttattttaatgaagttttaggtttttttttaaggagattgaatatacgaagtgtatttgtttattgtttgtagttaagaggaaaaatgtttttaaaatagtttttaagttggtaatatatttaatttatttaaaagttaagagtttattttttttttatataaagattttagaattattatagaaatatgttttaaagtagtttggatttgtgggaattgtttgaaagtttttaagttatttttaagtgttagtgcgatttgttatatattttgtttgtttttttttattattttttgaattgcggtgatagtgaattgttttttttttagtttacgtgagttagtttttttttagaatttttatttggattgtgtgattgggaaattaatattgtggagatgagggttttgagttataattagaaagatttgttttgaatgtttttttttatggtggtgatggtttcgtgtttatttatttataagtatgtattttatattattggtttttaattcgggggtagtttttgtttttggggggtatttggtaatgttttgagatatttcgggtttttatatttgaggatggaagtgttattagtatcgaagttgttaatattttttaatgtatagaattgttttttataataaaggtttatggataagttttgtatgttagtagcgtggaggttgagatattttgtttatataagatgaatagtatatttttgtttttgatggtagaataaagcgttttatgtttacgataaattgtattttagataaggatcggattttttatttcgattttattggtagtatgtaagtgttttgtgaaatttttttttttttttttttttttttgagataggttcgtattttgtagtttagggtggagtgtagtggtgtaatgtcgatttattataatttttattttttgggtttaagtaatttttttgttttagttttttaagtagttgggattataggcgtgtattattacgttaagttaatttttgtatttttagtagaggtagggttttatgatgttggttaagttcgttttgaatttttgattttaaagtaatttattcgttgtagttttttaaagtgttggggttatagatgtgagttattacgtcggtttagaaatttttttttgaaataggattttatttttaagtttttttttttttggtagggaaggggattagtttttatttataattgtaatttataaaatatatgaagttttttattgtagttatgaaaagatggaaaatgagtgttagcgtttatatttatttttatgttgagaaatatagtattattttaatgtagtaatttttaaaggattttaaaggtttagttatggtttttaaaattattaggtttataaaattttattttatttgtttattataggtggcggttattataggtgatggtatgtttattataggtgatggtacgtatcgatagttttagttatttaggaagttgagatgggagaatcgtttgagtttggcgggttaaggttgtagtgagttgaggtcgcgttattgaattttagtttgggtgataggagtaaaattatgttttaaaaaaagatgttttttttgattgttttatgtttattgttttgttgttagatttattattttttttttcgttttttattattaatttaaaagaataaaattgttttagtacggtggtttacgtttgtaattttagtattttgggaggttgaggggggagggggtggattatttgaggttaggagtttaagattagtttggttaatattgtgaaattttatttttataaaaatataaaaattatttagatatagttaggagtggtggtttacgtttgtaattttagtattttgggaggtcgaggcgggcggattacgaggttaggagatcgagattacgttgaaattttgtttttattaaaaatataaaaaaattagttgggcgcggtggtaggcgttttagtttgataatatgaatttatttatatttttttatagttttagtttttgagaaggttgaggtgggagaatcgtttgagtttgggaagttgaggttgtagtgaattaagattgtattattgaattttagtatgggtaataggagtgaaattttgttttaaaataaaattaaattaaattgaaattaaaaataaaaataaatggaaataatagtaataataataaagtttaaagagaatatatttagaagaagagtggagaaatatgaagaggggaagtaatagtaaaaataaaagtttagataggtaaatttattgttatgttagggtaggatatttgttgaaattaggttgattgaaaggtgtgtgtgttttgagtttggggtttgaggggttatacgagaagtatttttttagaaaggtgaagttgagaatttttgttaatttatattttgtcgatatttgtagaaagttttttggtttttttttttgttgagatatggttatttttttttttgttggataataggatgtttggatttttttcgtcgatgttgtatttagtttttagttttatttttgttttagtgtttttttttggaggaattttgagttgtttattgaggggtatgtgtttgtagttgagtttttttatagtgaaagtattgtattttgaaattatatatgggaaatttatttaatataatgttaaggtttgtaaattaataagtattggagataggttttaattaatgtagaggtttattttgttaaagttaaggatcgtggtttatgatagggttttagaaggttttgagaatatgtgtttaaggtagttgggttgtagttttttagtatattttagggaaaaagaagttataagtaaagatgtaaatgaatatatggaagatatatattggtttagtttgaaagggtaggatattttaaagtagagggtttttaggttataggtgggtttaaagattttttgattggcgattggttgaaagagttaagttttgtttgaaatgttgaagttagtagaaagaaatgtttgagttaagataaggatagtggggttgaagaagttaaggtttttgttatgtaggtgaagtttttaggtagtaggttttagagagaatagatggtaaatattttttattggattttaaaaggtgttagattttttggaaaagaattaataagggaaggcgattttttatagaatgtaaattttttttataagagatggttttgtaaggttattttagaatatgttaaagaaatatattttgaggtaaaatattttttttttttttagggtttgttatttgttatgtgatgttatattacggttaggttggagttgggtattttattgttataaagagtttgttttgttagttttaagatttttatgttaatgtgaatgttggttagttgtgtttaaattttaaaggaaggaggtatgtttgtttttttttttttgttatggtttgaattaattttttaggtttatttgggattttttggttaagatggggtttattgagtggaggtttagaattttattattttatttttattttataggttgaatggttttttgtataacggtattttcgttaagttaaattttaaatataagtatgtcgacgaaaagagttaaattttgtagaatatttgaagagatttattttgagttaaatatgagtgattatggtttatgacgtagtttttagaaggtttttagaatatgtgtttaaggtggtcggggtatagtttggttttatatattttagggaggtatgagatattaattaaatatatttaagaaagatattggtttggtttagaaaggcggaataatttaaagtggaggcggggttgggggggtggtatttttaggttataggtaaatttaaatattttttgatggatagttggttgagtttttgtttaaagatttgggattaatggaaaggaaatgtttaggttaagataaaagattgaggagattaaagtttttttgaagttttatagtggttgttgttagaaataatagatgataaatgttttttatttagattttttaaaaggtggtagattggaaggaaaaggtttagttatgttaatagggattttttatagatgtgtatttttttttataaaggatggtttgtaggattattttaaaatgtaataaaaaatatattttgggggtaaaatattttgatttttttttttgtttcgtaatgttatgttagagttacgttgtaaaataagttatgatatatagagttaaataaagtttatttaatgagaatttatggtttgtagggtatgattttttagattttttagataggaatttggataatatgaaagaattagagtttagtttttaagtagaatggaataatagtataatataaaatgaaagggtttaatttattaatgtaatatatgatttatattgaaaattttagttattagatttttaaatgatatattattttgttaaattgatatttaaaaagagtagatgattttgagttgtaaatatttttattttatttaataaagattttttatatgtattattaggagtttattgagtgttaatttttttattgatatgtttttaagtttttaattttttaagtggttatttttttttaggttattaatatttagaaaaaaatgtgttttaattgatttataaattttaagttaatgtaattgttgtttaatagtttttagaattattgtttttgaatggttatgttgtatgaaaaattattatttaaaaattaatacgaaagaggaggtattgaaagttttttataaagttttttatttttatgtgttgatgatttatttttagattttatgtaatttgaagtaattgttgttatatggtttatgatttttaaatttagtttgtattaagattatttggggtgtttatggatgtatttttttggttgtaattttaaatttatttaattttaattttggtggagtgtgggagaggggaggattaaatttatattttaagagatatcgatttatgtgtttagtttattgaatggaatagatatgtttgataatatgaatttatttaaaatgggatagttgaagattattgaatttttaatttataatttatttgatagggaaagttagtatatttttaattattgtttaatataaattatatatatatattggtgaatttagaaattttttttttttgtttaataatatttttgaaatataatttatatgttgtataatttatttgtttaaatagtttattggttttttatgtatttatagttttgtaattattagtagaattatagaatatttttattattatttttaaaaaaattttatagttattggtagtcgtttttttttttttttaatttttttagttttatatatttattaatttattttttttttttatatagattgatttattttagatattttatataaatgatggaattatatagtatgtaatttttttatttggttttttattttatttagtataatattataaaggtttattgatgttgtagtatgttttagtattttatttttttttattgttaaataatatttttatgtattttttttttattttatttatttatttattcgttagtaattatatatgaaatttgtttttattttttggttattatgaataatgttgtaaggagtatttgtgtataagttttaatggtatggatagaattataaatatgttgtatttattttattttgagattttatatataaaattttattaatttattttagaattatattataatattaaaataaattttgtgtttttttttttgtttttattgtaaatttttgatttaataaaataaaattttagataatagggggaaaaaaattcggtagaatggatgtttatttagaattttaagtattaattttaaattagttttcggggaattttgatgaatattttttagaaaagatgagtagattatttaaatattatataattttaaattattattttggaatgattttatttttatgtgttaaattgattatggtgtgtatttaatatttgatataatatttttatgcgttttaagaaatttatgaagatttttaataagatagtttttgtatttgtgtgtgtatgtatattagtgtaatttgtatttttattttttgatgtgtaggttttgaatttttgtgtgtgtgatagtgtaatggagtaatggtgataattgttaaagaagttgattttttagtggatattatttttttttttaaaatattgatggaataatattatttattttgttgaagaaaaaagggattatagaaataaataatggtttaatgagaagatgaatgtgaggaatgttggtttatattatgtgatatttttttttttttttttttgtatatttgattatttttttttttattaagggtgagttagatagttggtaatttatgttttagtttttttgtgttgtgtgtatgtgtatgtatgtgtgtgtttgtttgtatttgatgatttttataatgattttttagatttatgaagtatgttattttttattgttttcgaattttttgtgatattttttattttttcggatattttatatatttgattgatttatttattttttatttattattttttattaatttttttattattttaaaaggtttattttttttgtatataggttgatatgaggaagtaagtatttatttttagagaatgatatagggaacgaagtataattttgttttttgagaaaatattgatatgtgggttttaattatattagaaaattaattttatttttgaattattgattttggttatatttagtggtttgagtttttagggaataatttttatttattggtttttttttagagtagaaattgtatttatgatttgtagaaataattaatattaattatgttttgtaaagtttttttatataaaggttttttttaaatagaatgagttttttatttgttttgagtagtaatgttttttaattatagtaatagggtttttgtattgagaagaattaattttaaaattttatgattatattataagagaaaaaaaaaataagaaatgcgatttttttaatagttttttttttttttttgtataggtttattttttttataaaaagtttgagtaagaaagggttttgttttgttttttttttttagagtaataagtgaggttttagtttataagaaaggaaaagttttttgttttacggtttaatcgaattgattcggtggggttattagtgtggtaggtattggatttatattggttttatagtttgttaagtcgttgaagggaatttgtttgttattgtgaaggtggttttttgaaattgtttttttttttttcgttttttttttttttttttttttttgttaggaagattatggcgtgaagataaatagatgtttgttgttaaaatgtgttatttaatttgatttttaattaggtttataaaggagggttttgagatttttagagaggtagtttttgtattttattatgtcgtgaaatttggagtgaaagttttatgtttttggttgtttagttatgagggatatggtgatgatggtgttcggaggggattgggaagttagcgagaaaaaatataaagtaatagtagggataaagacggtttttttttattgttttgttttgattgttaggtggtttataaatttcgagaaatagagggtttagggtataagagtattttgttgttattggtttatttagttttttgggtggggatgcggtggaggtagtgattaggagttttttttgagttagaggggttattgattttgtttattaataaagagtaatagtaagtatattttttaaagaaagagagagaagtttattattttatgggaaggatttgttttatatttgatagatgtgtaatttttaaaaatatttagtattttttatttttaatagaagatgttattttgatatttttgttttgtattttttttgtaatatattttttgtatgttagtttattatattttttttttaaaatgagtaagttggatatgagttttttgtttttttataaatatgaatatatttttattatagtaaagaagtagaagagaagtattttgtaaattataaacgtatatttagtgatattagaaataaagtaaatttgtttttttttggtgaagtgagggtatattattagtagtattttggtgaaatagttttttgaggatatagggtatttaagttatttttatgaattgatatatgtataataatttgaatgagttggaaagaaattaataaaatatggaaaataattatttttttttttgtgtgtttttgtttagttaaattgttatatgtagtggtattaaattatattaagttgtttatttaaatttgtgggatttgtatattttattttaaatttttaaaatgattttatgtgtgagtgagattttttttaagttttttttaagtggaagaaagtaggtatgaatggtattatttatattgtaaatattatatgtttgttataaaaatgatgtttttatataagttatttttaggtgtattagaattttatttagggaattttattatttgataaagtagattttcgagtgttgtttttttgaagtaattagattattcgttttattagtggtatgtatgttttggggaaaggaaagttaggttttttttttttgataaaggaaacgtatatgtttttaataagaattatttttttttttttgttttattggtttatataaattttgttatatttttaaaaatatatttagtagtcgttttaagtattgttaagatttaagtttttatttgttttaaagttaaagttgattttaaatagtttgtgaattatagattatttgtttttattttagaatatagtagaaatttttggagtgtttttatgttgttaaaatttatagttttatttttatgtttaaaaagattaaatttatttggaatatattttttttttattttatttgtttttgtttggttaattttatttattattttgttttttgtttagatatatttttttgtttagggaattttgtatagttgttatttgggttaggttttttttatttgtatttttgtacgtttttgttttacggttttgattttattgtattgtaatggtttaattttgttttttattatattttaaggttaaagtatgtagattgtgtgtttgatgtatttacgtgtttttaatattttttggattgtttaatgtatagatgtgaattaataaatatatacgtagagaaggtagagagggaggttataaagtaaagggagatttttgtaagattagaaatgatattggtgatataatagataattagaaaagttatggttatattttttgtatttttgatgttataagggttaaaaaattttagtttatatgtattattttagttgtttttattaggtagtgttagtgaagaaaataaattattttaggtatataaattagaaggaatttaatataagggattagatgtttttaaaatgattagaggtgttgaaggaatggattttaggtttagtttttagaagtgattttaaaatagagagttgatttttttgtttgttttgagttttttttggagtaataatgtgagagttaagggttattttttgatgaagtttttatagatatttaggaagttggagaatgaagatttgaagattgtagtagaaaatttttatatttttataagggttttaaattatagaaatagtgaataaggtataagtaagaaaatattttttgttttttttttgtttttaaatgttgcgtaaatatattgatgagtataatttaattgaatttagaattttagtggtatgattatttgggaaatgtagtttttatttttttttttattggaaggtgggtgtgatggatgttgaatgtatatttttgtattttttttttaatttttttagttttttttttttaatatggtagttattagttatatagttttatagatttaaatttattaaaattgaatattttattttttagttttattggttatattttaagtgtttagtagttttatgtggttgttggttgttatattggatggtgtatatgtagaataattttatttttgtattatgttggatattattggtttaggtaatgtgagttatttttttttttttttttttgtatttttttggtttagtagagtagttgatgaatgaatgggtaaaggggtaatgaaggtaagtttagagttaattaaaatagtgtttagttagttaagttgtaaaatgtaaaataataagaggaagagatatttttggttgagtttttaaatgtgtattttagttaaggggataataagggaaaataagtataagaaattgatatttgtattgtttatagtatgaaggaggtttttttaaattttgtgtaaaattttttgaaagattgtagtagttaaataaatttttatgatttaaatttattgagttagtgtttgttgttcgttttggttgagtttataaatagtttttattgttattgtattatgatggaattttattggttataagaattttaatattattttttttgtggtgaagagagaataaaattaaatatttaagtgaggttgtataaattttaagtttgggttaaaggttaaataggttttattataaacggagttttttatttataattaatatatattttttattatggtgtttttttttaagtatttgaaaagttatgaatatgatgtttaatttattaatttggagtagatttattatataatgttaaattgaatgagtttgtttagggatgtattaatgttttagaggagtttttatgttgataaagttggggtgatttgatttggtaagggagataggaaatatgaaagtttttatgagatttggttttttggtttttttaagagtatattatgttttttttgagtttgatatattagataattaagttatatagatagatattaagttgttagtgttataagttttttttattagaagaggattagtgttgatattgttgttgattggttttattgtatagatatgttttattttaggtttttttttagaatttattataattatttattttttagataaagagatgtatttattggaaataataagttaatagtatatagttatttatggtatttttatatattattgatataaataattttgttaagtaagaagtagatattataaataagataggtttataagtagttttgtgagatttaatatagggataaagagtaaaattttattttttttgtgatgtatgtcgtattttgtaaggttattagtataggaagaaaggatattaggttatttaatttgggaataagattgatatggttttttaggattattaattaaatgtttttttaggagatgtgtgttgttaagaaaatgtgtaggaaaaaaatatatatggagataaggattagagttagatgagtataagtttttaaatatagtattaagtgagggaaattttaatttttatttaatttgttatagttttttttttaattttgtagtatagtgatgttagaattatgttgtgtagatttaattttgatttttattggggagacgggtttggttgtttaagtttttcgaatgttgtgattggtgattttagttgagttacgtaaaatttgatttaatgaatatttgagattttggacgtataatatggatttcgttaatttagtttgtaaaatttggttaatggttttgttaggatttttgagttattttgattatttgggggttagtattggagaaagttgagcgatggatttgatagtttgtcgaaggatatatagatgttttataattagattataattttaaaaaattgtgtgtttgtgtgtgtgttatattttttgggttggaaattatatgtatagataatagtttttagtttttattgattttttagtattttgattaaatatgtatttttatttttttagagaaaaggttgttttgttatgtatattattttattaagttgtttgtgcgttagtaaattttttattgagggtgagtttttttgtgtttttaggaaaatgtttatgtgaggatgtaagtttttttttgtgaggaaaggatatttattttttttttattgttttgttttggtaaaatattaatattagtttttttttattggatttttaataaatatagattgattttgttgattttagaatttatgtatgaatgtagttagggagtgaatatattattgaaaattaatatttatttaggatatgttatgtagtagtttgtaattgtaaaagaagtaggttttatttattttttattttcgttgtgaggaatatcgtgtttggatgttgtaagaaggatttatttagtataaaggagggagggatatagagggtttaagaggtaaattggattatagtgttgagtgatttcgttttttgtgttttgtaattagaagtgatggtagagaggaaggataattgggatttttatagagttattttggagtttatttgggatttttaagatgattgaggttatgttgggttttttattttagggtttttgaggttgtggttaaattattagtttatatagtttattgaaattgattttatagagtttaaaagattttaggttttgtttttttttttttgaatagttgtttgggaagatatattatttatttggtatgaggttttagatttgaagtatttgtttttaaatttgtttatttttataagtttattgataggaatttaaattttttaatgttttttgtttatagatttatatttataatagttttttaataatgttagttagagaaaatttgtgatttgagattttaaataattttaagattattttatgaatttattttttattttaattttaaaaaatatatttaagttatgagaatattgtaaagaatttttatatattttttatttaaattagggtattgtaagttttttgttaaagatttataaatattttttgttggtttggttatttgttgtaattatttaattttgttgttgtagtgtaaaagtagttataggtaatatgtaaatgaatagatatggttttgttttaataaaattttatttataaaaataagaggtgggttatatttggtttttggtttttagttgtttgatttaatttagatttattagtcgttatttttttttttttttttttttttttttttttttttggttatatttgttttattatattttttttttttgtatatatatatatgtatatatatataaatgtataacgtatatatatatattatgtgtatatatatatatatatatatttataattatttttttttaattatttgaaaagaagatgtaggtattatgattttttatttttaagtaattaagtatgtattttttaagaataagtgtatttttttagtaattattaagagaatttattaagagaatggaattattaaatgtaagtgataatattgatataatattaatattatttgataaaattattaagtgtaggtgatttaatattgatgtaacgttaatatttaatttacggtttatatttaaattttattgattgtttcgataatgttttttatagttttattttgtttgatttaggatttaattttttattatgtgtggtatttgttgttatgtatttttagttttttttggtttggaattattttttagtttttttttgttttttaggatattgatatttttgaagattagaggttaattgttttgtagattgtttggtatttttttttggttagatttaggttttttataatgggtaggaattttgtttttgtgagatgttgagtttttgttagtgtatttttttaggagatatttgagtttcgttttgttttttttttttatttttggaggtaatatttttgatttttttgttaaggtgcgttttgttaggtttttatattggaaagttagtattttttttttataattaatattttttaaatttgagtagtgattatgggaatattatttgaagttttaatattgtattaaaaatgttatattagaagattgcggttgaaaaataggaatgtaaagaaggtatgttttgttttttaggtaagagaattttatgattttgtttattttaagaaatttaattaagtggaaaagaattatattgagagtatggttttttgattgttttttttttatttatttatgtagtttttaaatatttttttcgaaattttaaggattttttttgttgtgaaaaagtagttgtgataaaatgaggttcgtgttttttgataagtttcgtagtgagagagttattgtttttcggacgttttagagtaagttgatttgtgatgcgaacgttttaggtttgatgttgttgtggttgtgttaggttggtatgttaattttttgtgattgaggttgtaatgattgtttaattgtattttagagggttgtttgttaaaagattttattattttggtaagatatagtgtatttttcgatatataggattgtaataatttttatatagtattaatttagagttggagggaggttatgaatatttttaaaggtagtagggtgtatatattttaggaaatatatttgggagaaaaaaatagtttttatttaaaaagtaggtttatagttttttagagaaatttgttgttattaatttagaaaatagaaatggtttttgtaaatttttgtagatagtattgttatatgatatgaatgtatatttatataaaataaaaagttggaggttttttttttttaagaattttaaggtttattttttatatttaggtaatattttagataaaattaagtataaggtattatttgattttttaattatttaatagaaaatatttttgtgaaagaaaaggtattgggttatggttttaggatatttttttttattttatgttttggttatatatagaatattattatattatttaattttagtttttggaaatgtgggtaagaaatgtggtattttaaaaataattattagaatatgtttgagagattggaattaagagaaatttgaattttttttttaattaaaagggaaaatgtaggtaggtattagggaaatatgaaagaattataaaataaagtttttttattggttttttagaaatggaagagaattagatttattaagtatttattatgtgtagatattttaaaaggtggtttttataaattttatttgaaaaaagtttatttgagtaaatatttttttattgttttatgtattagaaacgtatagttgagagaggttaaaataaaatttgaatgggaaaaaattatttagtttgaggtagatgagggatttttttttgggttagtttaaatttaaaatttagtgtttttttggttgtttttagatttggttagaattatgagttttagagttttttatttgggaagtggtttgatttatttatttatttaagattattaaagtttagttattagaattgtatttacgaaggtatatatatttaaatattagtgtttttttattatattggaaatttgtggtttatttatataggttattaatatgttatatgattattgttatatttttttatatttaaatgtttatattttttaagttggagtgaaattgtacgtttatgtttagttttaggtagagttatggatttaaattttattatttggtcgttgtttttgtgaaaatgttttagtttttaaatttggaagttgtatagggttgggtttaatgataggagtgatacgttgtttttttaaaatttattgtttttatattgtaatttttataatagtttttgggattttgattaattgataattttttattttttttatatttttaattattttgatttttagttagatttttttcgtttgattttttgttttttgtttattaacgtgttttagttattttattttgaagtataaatacgtaaagagagaataaaatagattaaagaaaaaaaaattttattaaattatgaaattttatataggttgttattttagttttcgtatagtttaatttttaaaatttttgatattttaatttaattttgtttgtatttttttatttgtatttttgacgtttgtttgtaaatgtatatgttatgatttttgtagagatttaaggtttttgaaggtagttttttgtgtagtttatagatttagttataggtttattatttagtatgatattgtggttatagttagaatttaggaaatggttgtaaaaggaataaattaatgatgagagagaaagataaaagaaatttataaatgttattattagttttaatttttattttaaattgtatatttataattttaatagtttgttggataatattttttgtacgtattttggatatttttaattcgttgtgttaagtatttagtttcgtatttttttttatgtttgttttttttttttttttcgttttggtgatattattagtttttttgagatttagattggaaattttggtgtttttttttatttgattttttttatttttattttttaaaataaattggtaattatgttgatgagattgtatttttatatttttttttataggttaatattttttttttttttttatttaatgttttttgatattttggtggtatattgatattagaaatggtagatagaagattggaagacgttgtaaagatttttgttttggtttattttattgtaatgttttatttttttaatttattttttgttttaatatttaagtttttataaatataagttggaataaataattagttttgagtgtgttagtggttttttattgaatttaagggttatttttttagttttgttttttgttatgtgtttttttttattagtaattagatattatattttttattttatatatttaatattatttttattttaaatttatttatagttggttaagttttagttatagttatttttttaagttgatttatgggtttttagttttgtgaagttttttttaatgattttttatgaaaatatatatttttttttttattttttatgatttttttttggttttgtttgtttatttatttatttatgagatggaggtttattttgttatttaggttgtagtgtagtggtataattttagtttacgtaatttttagtttttaggtttaagtaatttttttattttagttttttaagtagttgggattataggcgtttgttattatatttgtttaatttttgtattttttggtagagatagggttttattatgttggttaggttggtttcgagtttttgattttaagtgatttgtttattttatttttttaaagtgttgggattataggtatgagttattacgtttggtcggtatgtcgtttttaattcgtttattttatgatttattgatgcggatttatttatttatatattttttttttataagagattttatgtttttttagggtagaatgaattatgttatatttttttttgttttggtgattagataagtattttgtatattagaaatattaatttatattgttgatttagttaatttgttgttaattcgaatagattgaaatttatggatttgttgtttttttgttttagtatgggttttatttatttagtataatttgattacgagttttatttgttgattattggataatgtaaaattttgaatttcgtgtgaattttttttgttttagaatttattgtgatggttgttttggtaagaatattttttttgttgtttttttatgaaagtgtttggttaaatgtaaagtatggaatttggtgttaaattggttaggtggtgatttataaagtagtatttataatttttttgttgattagtatttttatttatgagttggaggtttttttttgtgatatgaaatagttttattggttgtgtttatatgaaggttttggaatgcgtaatatttagggtattttggaattgaattttagagagatttgggagtattatagtttattaattttatggatttgtaaagtattttttagtgtatagatattttttatatatattgttttatgaattttttgtagtaagtggtataaagtgttttattatggaaaatattttttatttgagtgtgttaaagtatgggtttaattttaattgttttaattttttttagagttattagttttgtttttttaattttttttaattttagtgttttttttttaaaatgtaagaataattgtgttttttttaaaattttttttttttttttgagatagagttttattttgttatttaggttgtagagtgtagtggtgtattttgtagttttaaattttcgggtttaagtgatttttttattttaattttttgaatagttgggattataggtgtatattattatgtttagttagttttttaatttttagtggagataaagttttattatgttgtttagtttatttttgaatttttgggtttaagagattattttattttagttttttaaagtgttggggttatagatatgagttattatttttagttaatagtgtataattttatatatttttatagatgtgttgtgatgaggttttattagataaatagttttaaaagtggtttgtaatttgtaaagtttttatgttaagtagaaatatatttagtatttatttgttaaacgatgatatatgcgattagtttttttaatttatatatttttttttgaaatttaaagtgtttttttattggaattgaagtagtagtttcggaagaaatgattttagtttattattttaaaatttgaaagtttaaaatttttgttaaaaatataaattttggttattgttttggatagttttaggtagtatatgattatggcgtttataggagtttatgtaatatattttaaagtaattgttttttggtagtagtattttttttataattatttttttcgtggaagagagatgtggggttgttataaggtaaattttaaaattggagtttagtttgggaggttatatgggtttttggttttatgtaggaaggaatttaagagtaaggttatagagtaaagtgaaagtaagtttattaagaaagtaaaggaataaaagggtggttgtgttataggtagagtaatggtatgggttgtttgattgagtaaatttattattatttttagattatatgttaaataaggggtagattatttatgagttttttgggaaaagggtggggagttttggaattgaggtttttttttttttttagattatatagggtagtttttggatattgttatggtatttgtaaattgttatggtattggtgggagtgttttttagtatgttaatgttttataattagtgtataatgagtatatggataattagaggttgtttttatttgttattttggttttggtgggttttgattgatttttttattgtattttgttttattattggggtttttgtgatttgtattttgtgtaattagttttgttaattttttattttattttgtgattaagaatgtttaattttttgataatgtagtttagtagtttttggttttattttatttagtttttgtttaagatagagttttttgggttttaatatttttggtagggttgtagttttttgatatatttttttttttttttaaattgtttgtagaaataggaagttttttgttttatatgaagtatgagagaaagtgtgttattgtcgttttttttcgtaatattttagtttttgttgaaatttttttttttttaattggttagagtattataaagaaatagatttttggtaaatttattttgtaaatatttatttagatgattgtatataggttgtgtttgttagagagattttatggaggattattaaaagaaaatgttggttgttattaataatattttgaaaaatgtttttagatattgttgattattagttattggatttgaagtaggaatgtaattaaaatagagttttaaatgaatgatatatattgatgttagatttggtagagtttttggattaatagtaaaataagtgtgttgtgtattgttttgattagtattttagaaatatgtttgtttttgtaaatagtatttgttttgtataaggtatttgataattttataagtttttaggattatggttatgtgggattatggagattttaaaggtttgagattttttgtgtatcgatatttatagttgtgaaaatgtaattgtgtatatatgtagtagtatatttttataatttatatttttagtaataagagaaaataaaaattatatgtttatttttagacgttgttagttatatagtatttaatagtgtttttatggaataaatgtttgttgggtgttttttgagtgaaatgataaagatttattttgtagtggtaagagtgttatgtatttattttaaatggttttgaggaagaattaggttttagtatatttttaaataattattaaatatttttgttttgaagtaaatgtttagaaaaaataagtaataagagttttgaggataaagtattgatgtagttataggaaataaaaaattagttttttaaggaaattataagtaagttggataagttttttttttttttttttttttttttttgagacggagtattattttgtcgtttaggttggagtgtagtggtgtgatttcggtttattgtaagtttcgtttttcgggtttacgttatttttttgttttagtttttcgagaagttaggattataggcgttcgttattacgtttggataattttttttgtatttttagtagagatagggttttattgtgttagttagaatggtttcgattttttgattttgtgattcgtttgtttcggttttttaaagtgttgggattataggcgtgagttatcgcgttcggtttttagataagtttttaaataatgttttattattattaaaattgttttttttttagaattgttatattgatgaaaaatttgtttttgaatatttttgagagaagtaagtattgtaatttggggtaggtttatatatgttttagaaaagaattattaaagagtttaagtttttttaaaaaaatgaaaataatttaaaatgtttatatgtaatattattatgatatttaaaaatttttttatgagaaatatatgtttttaatggtatttatatgaagtaagaaagagatattattttaaagagtaatggtttagggattgtttacgggtagagatttagttatttgtaaggtaagtttttgttattttatttaagaaatatttaataagtatttattttataaagatattgttaaatgtaaatattaaatttggtggtagtttttttttttttttttttttttttttttgagatagagttttgttttgttatttaggttggagtgtagtggtatgattttagtttattgtaatttttgttttttgagtttaagtaatttttttgttttggttttttaagtagttgggattataggcgtttattattatatttagttaattttttgtatttttagtagagataggtttttattatgttagttaggatggtttcgattttttgattttatgatttgttcgtttcggttttttaaagtgttgggattataggtgtgagttatcgtgttcggttaatggtagttttttttaaagtttattaagtattagaatttttagtagaatttgttaaaatagatttttggattttggttttagagatttagattgtaggttgagaatgaggtttatgaatttttattttatataaattttaaaggatgtttataatattagtaattgattatattttgagtattattgttataaagaattgatagttggtataggggtagttgattttatatatataattgataaaaagatggtaataaatattgaaaattaagtttttttagagttttttagtgtattttttaattgtatttgtattttaaaatatggaagagattattagaaaatagagtgtaaaagtagtattgttttattatatattcggaattttatattatatatatttgaaatttaattgagaatttttattgttatttgaaaatttattaataatgaaatagaaataatatagataaaataattatgaatgtatgagagttagggttatgtttatatttagatgattgatatttgattatatgattattaatgtttaaaattataatttgtattaaatataattttgaggattaagtttttatgtatatgaatgtaatatttttttttttaattatgaggtttggttattaataattaggtatatatagatatttcgtatgtatatattatatatgttttatttttatttttatttttatttttgagatagagttttgttttgttatttaggttggagtgtagtggttcgatttcggtttattgtaatttttattttttgggtttaagtgatttttttgttttagtttttcgagtagttggaattataggtgggcgttataatgttaggttaatttttgtattttttggtagagacggggttttattttgtcggttaggttggttttaaatttttggttttaagtgatttgtatattttagttttttaaagtgttggtattataggtttgagttattatatttggttttagagtatatatattttatatattatgtgtgtatatataatatatatagtgtatattagtaataaattatattatatgtgtatataatttgtttatttaataattttattatttattattataaacgtttttgaataatggagtttggttagtgtttttgatttattagaatgtatatagtaataagttatatgtatgtatgtttaagtaaattttattttttgttatgagatttttatgttataatttaatagatttatttaatgtattttaatggagtgattaaattcgatgtatttgagtgttgttggatttattgagataaggatataagttaataataatatatatgtgtatatatatatagatataaatttaatataatgtatttttatttgtagaagagtgtataaaaaatagttttatgttgttaatttaaaagaaatgtaatattaatttttatgaggaaaaaaattttatgaaataataatttttagaaagtattttttggttgggcgtagtggtttacgtttgtaattttaatagtttgggaggttgagacgggtggattatttgaggttatgagttcgagattagtttggttaatatggtgaaattttatttttattaaaaatataaaaattagttcggtgtggtggtaggcgtttgtaattttagttattcgggaggttgaggtagaagaattatttgaatttgggaggtggaggttgtagtgagtcgagatcgttttattatattttagtttagggataagaatgagattttgttttaaaaaaaaaaaaaaaaaaaaaagaaaagaaaagaaaatattttttattgaatagaaaatatgttttattttaatttttttagttgatggtgacgattattattttttttgtaagttattgtcgggcgttgtaattttttttttttaattgtgttgaaatatattttttggttcgcgttttgtaatgatgtttttgtttagattcgtgttatatttagttaaaaagagtagttgattttttggttttttaaattaattagaataaataggtattgaaaaagtaataattataggtgaatttttttttttttttagttttgtttgtttttatgttttatttatttttattgtttttttttttta

SEQ ID NO: 2148 - DNA, 113515 bp, Artificial Sequence
  chemically treated genomic DNA (Homo sapiens)
tggaagagaggaataataaaaataaataaaatatggaaataaataaagttgagaggaaaaaagaatttatttgtgattgttgtttttttaatgtttgtttattttagttagtttagaaaattaaagaattagttgttttttttaattgggtataatacgaatttgagtaaaagtattattatagaacgcggattaaaaaatgtattttaatataattggaaaggaaaagttatagcgttcggtagtgatttataggaaaagtaatgatcgttattattagttggaggaattggggtaagatatattttttatttagtaagaaatatttttttttttttttttttttttttttttttttttttgagataaagttttatttttgtttttaggttggagtgtgatggggcgatttcggtttattgtaatttttattttttaggtttaagtgatttttttattttagtttttcgagtagttgggattataggcgtttgttattatatcgggttaatttttgtatttttagtagagatggggttttattatgttggttaggttggtttcgaatttatgattttaggtgatttattcgttttagttttttaaattgttgggattataggcgtgagttattgcgtttagttaagaaatattttttaaaggttgttgttttatgggatttttttttttataaaagttaatattatattttttttaaattggtagtatagggttattttttgtatatttttttataagtgaaaatgtattgtattaaatttatgtttgtatgtatgtatatatatgtattattgttaatttgtgtttttattttaatgaatttaatagtatttagatatatcgagtttaattattttattaaaatatattgaataaatttgttagattatgatatgagagttttataatagaaaataaggtttgtttaaatatatatgtatataatttattattatatatattttaataaattaaagatattagttagattttattgtttaagaacgtttgtaataataaatagtaagattgttggataaataaattatatgtatatataatatagtttattattaatatatattatatatattatatatatatatatgatatataaaatatatatattttgaggttaggtgtggtggtttaagtttgtaatgttagtattttgggaggttgaggtgtgtaaattatttgaggttaagagtttgagattagtttggtcgataaagtgaaatttcgtttttattaaaaaatataaaaattagtttggtattgtggcgtttatttgtagttttagttattcggaagattgaggtaggagaattatttgaatttaggaggtagaggttgtagtgagtcgagatcgggttattgtattttagtttgggtgatagagtaaaattttgttttaaaaataaaaataaaaataaaaataaagtatatatagtgtgtatatacgggatgtttgtgtgtgtttgattgttagtagttaggttttatggttgaaaaaaaaaatgttatatttatatgtatggaaatttgatttttaaaattatatttaatgtaagttgtaattttaaatattaatagttatatagttagatgttagttatttaaatataagtatagttttagtttttatatatttatggttattttatttatattatttttattttattattgatgagtttttaaatgatagtagaaatttttagttaaattttagatatgtataatgtagaatttcggatatatggtgaagtaatattatttttgtattttgttttttagtaattttttttatgttttaaaatatagatatagttagaagatatattggaaaattttgaagaaatttaatttttaatatttgttgttatttttttattaattatatgtatgaaattaattgtttttgtgttaattgttaattttttataataataatgtttaaagtgtgattaattattgatattatgggtattttttggagtttgtgtgaaatgaaaatttatgggttttatttttaatttatagtttgaatttttgggattagggtttaggaatttattttaataagttttattgaaaattttgatgtttagtaaattttaaaaagaattgttattggtcgggtacggtggtttatatttgtagttttagtattttgggaggtcgaggcgggtagattatgaggttaggagatcgagattattttggttaatatggtgaaaatttgtttttattaaaaatataaaaaattagttgggtgtggtggtgggcgtttgtagttttagttatttgggaagttaaggtaggaaaattgtttgaatttaggaggtagaggttgtagtgagttgagattatgttattgtattttagtttggatgatagagtaagattttgttttaaaaaaaaaaaaaaaaaaaaaaaaaagaattgttattaaatttgatgtttgtatttaatagtgtttttatggaataaatgtttgttggatgttttttgagtgaaatgataaagatttattttgtaagtagttgaatttttgttcgtgaataatttttagattattattttttggagtaatgttttttttttgttttatataagtgttattaagaatatatattttttataaaaaaatttttagatgttatagtaatgttgtatatgaatattttaaattatttttatttttttaaaaaaatttgagttttttaataatttttttttaagatatatatgagtttgttttaagttatagtgtttattttttttaagaatgtttaaaaataaattttttattaatatagtaattttaaaagaaaaataattttaatagtaatgaaatattgtttaaaaatttatttaaaggtcgggcgcggtggtttacgtttgtaattttagtattttggaaggtcgaggtaggcggattataaggttaggagatcgagattattttggttaatatagtgaaattttgtttttattaaaaatataaaaaaaattatttaggcgtggtggcgggcgtttgtagttttagtttttcgggaggttgaggtaggagaatggcgtgaattcgagaggcggagtttgtagtgagtcgagattatattattgtattttagtttgggcgatagagtgatatttcgttttaaaaaaaaaaaaaaagaaaagaaaaaaatttatttaatttatttatgatttttttaaagaattagttttttgttttttatggttatattaatgttttgtttttaaagtttttgttatttattttttttagatatttgttttaaggtaaaaatgtttagtagttatttaaaagtatgttaagatttaatttttttttaagattatttgaaatgaatatatgatatttttgttattgtaaggtaagtttttattattttatttaagaaatatttaataaatatttattttataaagatattgttaaatgttatgtggttaataacgtttgaaaataagtatgtgatttttgtttttttttattgttaaaaatataaattataaaaatatgttgttatatgtgtatatagttgtatttttataattatagatatcggtgtataaaaagttttaagtttttgaaatttttataattttatataattatggttttgagagtttgtggaattgttaaatattttatataaaataaatattatttataaaaataggtatatttttggaatgttaattaaagtaatatataatatatttgttttgttattaatttagaagttttgttaagtttagtattagtatatgttatttatttaaagttttattttaattgtatttttgttttagatttagtaattagtaattagtagtatttaaagatattttttaaaatgttattaatgatagttaatatttttttttaataattttttatgaaatttttttgataagtataatttatatataattatttgagtaaatgtttgtaggataagtttgttaaaagtttatttttttataatattttggttagttaaaaaaaaaaagattttaataaaagttaaagtgttgcgggagaaaacgataatgatatatttttttttatattttatgtagaataaaaaattttttatttttgtaagtaatttaaaaaaaaaaaaaggtatgttaaaagattgtagttttgttagaggtgttagaatttaaaggattttattttgaataggggttgggtaaaatgaggttaagaattgttaggttgtattattaggaggttaggtatttttagttataggatgagataagaggttggtaggattagttgtataagatataggttataaagattttagtgatgaaataggatgtagtaaagaagttagttaaaatttattaaaattaagatggtaaatgaaagtaatttttggttgtttatgtgtttattatgtattaattataaggtattagtatgttaaaagatatttttattagtgttatgatagtttataagtgttatggtaatgtttagaagttattttatatggtttaaaagggggaggaaattttagttttagaattttttattttttttttagaaaatttataaataatttattttttatttagtatataatttagaaataatgataagtttatttaattaagtagtttatgttattgttttgtttatggtatagttatttttttatttttttatttttttaataaatttgtttttattttattttgtagttttgtttttgaatttttttttgtatgaagttaagaatttatgtggttttttagattgaattttaattttggggtttattttgtgataattttatattttttttttacgagaggagtgattatgagagaaatattattattaggagataattgttttagaatgtattatataaatttttataggcgttatgattatgtattgtttaaaattatttaaaatagtaattaaagtttatatttttagtaaaggttttaggtttttaagttttaggatgatagattaaaattatttttttcgaggttattgttttaattttaatgaagaaatattttaaattttaaagaaaaatatgtagattgagagagttaatcgtatatgttatcgtttggtaggtagatattaagtatgtttttatttaatatagaaattttatagattatagattatttttaaaattatttgtttagtggagttttattataatatatttatagaagtatgtaaaattatgtattattggttgggaatggtgatttatgtttgtaattttagtattttgggaggttgagatgagatgattttttgagtttagaagtttaagaatagattgagtaatatagtgagattttgtttttattaaaaattaaaaaattagttgggtatagtagtgtgtatttgtagttttagttatttaggaggttgaggtgggaggattatttaagttcggaagtttgagattgtagaatgtattattgtattttgtagtttgggtaatagagtaagattttgttttaaaaaagaaaaaaaaattttaaaaagggtataattatttttatattttagagaggaaatattgaagttaagagaggttaaggaaataaagttagtgattttgggagagattggggtaattgggattgaatttatgttttagtatatttaaataaagggtattttttatgataaagtattttatgttatttgttataggggatttatgagataatgtatataaaagatatttgtatattgaaaagtattttgtaaatttatgggattagtaaattatggtgtttttagatttttttgggatttagttttagaatgttttaggtgttacgtattttaagatttttatataagtataattaataagattattttatgttatagagagagatttttaatttatgagtggaagtattgattaataaggaaattgtggatattattttgtgaattattatttggttagtttggtattaaattttatattttatatttaattaaatatttttataaaaggatagtagaagaaatgtttttattaaaatagttattataataaattttaaagtaaaaaaggtttatacgaaatttaaaattttatattatttaataattaataagtggaattcgtgattagattatgttaaatgaatagaatttatgttaaaataaagaagtagtaggtttatagattttaatttgttcgaattagtaataaattagttaaattaataatatggattaatatttttaatgtgtaaagtatttatttagttattaagatagggggaaatgtggtatgatttattttgttttgagggagtatggaattttttatgggagaaaagtatgtagataaataagttcgtattagtgaattataaaataaacgagttaagaacgatatgtcggttaggcgtggtggtttatgtttgtaattttaatattttgggagggtgaggtgggtagattatttgaggttaagagttcgagattagtttgattaatatgatgaaattttgtttttattaaaaaatataaaaattaggtaggtgtggtggtaagcgtttgtaattttagttatttgggaggttgaggtgggagaattgtttgaatttgggagttggaagttgcgtgagttgaaattgtgttattgtattatagtttgggtgatagagtaagtttttattttataaataaataaataaataaataaaattaaaaaaaagttataagaaatgaaaaaaaggatatgtatttttatagaggattattgaaaagaattttatagaattagggatttataaattagtttagaagggtgattgtgattagaatttgattagttgtaagtaaatttgggataaggataatattgaatgtatggagtggggagtatggtgtttgattgttagtaggagaaaatatatagtagaaaataaggttggaaggatagtttttggatttaatgaggagttattgatatatttagaattaattgtttgttttaatttgtgtttatgaagatttgggtgttggaatagaagatggattagagaggtgagatattgtagtaaagtaaattagagtaaaagtttttataacgttttttaattttttgtttgttatttttagtgttagtatgttattagggtgttagaggatattgggtgaaaggaggaaaaggatgttaatttatgaaagggaatatggaagtgtaattttattaatatggttattaatttgttttgagaagtggggatgagagaaattaaatggggaaaggtattaaagtttttaatttagattttaagggaattgatggtgttattaagacgaaggaagaaggagaaataagtatggggaaagatacggaattgagtgtttaatatagcgagttagaggtgtttagggtacgtataaggagtgttgtttaataagttattgaaattgtggatatgtagtttaggataaaggttaaagttaatgatggtatttataagttttttttgttttttttttttattattaatttattttttttataattattttttgagttttaattataattatagtattatgttaagtgatgggtttatggttaaatttatgaattatataagggattgtttttaaggattttaagtttttataaagattatagtatgtatatttataagtaaacgttaaagatatagataaagaggtatagataaaattaaattggagtgttaaaaattttaggagttgggttatgcgaaaattagaatggtaatttgtatgagattttatggtttagtaaagtttttttttttttaatttgttttgttttttttttacgtgtttgtgttttaaaatgaggtgattggaatacgttaataggtagaaaataaaggattaaacggaggaagtttgattgaagattaggatgattgaagatgtagaagaagtaggaaattattaattgattaaggttttagagattgttgtaggggttataatatgaaaataatgaattttagagaggtaacgtattatttttattattgaatttaattttatatagtttttagatttgaaaattgaaatatttttatagaggtaacggttaagtggtagggtttagatttatggttttgtttaggattggatatgaacgtatagttttattttagtttagaggatgtaagtatttggatgtagggaaatgtgataatgattatgtggtatgttgataatttgtgtgaataagttataggtttttaatatggtgggaaggtattgatgtttagatgtgtgtgttttcgtggatgtaattttggtggttgggttttagtagttttgaatggatagataagttaggttattttttaggtgagggattttgaaatttatgattttagttaagtttgaaggtaattaaaagagtattgagttttagatttggattgatttagaggagaattttttatttattttaagttaaatgatttttttttatttaagttttattttaattttttttaattatacgtttttgatatataaaatagtgaaaaaatatttgtttaggtggattttttttaaatgaaatttataaagattattttttaaggtgtttatatatagtaggtatttagtgaatttagtttttttttatttttaggggattaataaggagattttattttatagtttttttatatttttttaatgtttatttatatttttttttttaattggaaaagaaatttaaattttttttaattttagttttttaagtatgttttaataattgtttttaaagtgttatattttttgtttatatttttaaaagttaagattgaatggtgtggtaatattttgtgtgtggttagaatatggaatgagaagggatattttgagattatagtttagtatttttttttttataaaagtattttttgttgaataattaaaaaattaaataatgttttatatttaattttgtttggagtattgtttggatataaagaataagttttggggtttttaaaaaaaaaaaatttttaattttttattttatatgggtatatatttatattatataataatgttatttataaaagtttgtaaagattatttttgttttttgaattaatggtagtaagtttttttaaaaagttgtggatttgttttttagatgaaagttgttttttttttttaaatatattttttaaaatatgtgtattttattgtttttagaagtatttatggtttttttttagttttaaattggtattgtatagaaattgttataattttgtgtgtcgaaaagtgtattgtgttttgttaaaataatgaaattttttggtagatagttttttgaagtgtagttgaataattattgtagttttaattatagaggattagtatgttagtttagtataattataatagtattaggtttgagacgttcgtattataaattaatttgttttgaaacgttcgaagggtaatgatttttttattgcgaaatttattaggaaatacgggttttattttattataattatttttttataataaagggagtttttggagtttcgggggaagtgtttagaaattatataagtaaatgagaggaaagtaattagaaaattatatttttagtgtaatttttttttatttaattaagttttttgaagtagataaagttatggaatttttttatttggaagataaagtatattttttttgtatttttattttttaatcgtaattttttaatatggtatttttggtatagtattgaagttttaaatagtatttttatggttattgtttaaatttaaaagatattaattatgaagagaaagtgttaattttttagtgtagaaatttagtagagcgtattttaataaaaggattaaagatattgtttttaagaatgggggaaaaaagtaaaacgaaatttaggtgttttttgaaaggatgtattagtaaggatttagtattttatagaggtaggatttttgtttattatagagaatttgaatttaattaagaggaaatattaaataatttataaagtaattagtttttagtttttaaaaatattaatgttttgaaagataaagaaagattgaggaatggttttagattaaaggagattaaagatatatgataataaatgttatatataatgaagaattggattttgaattagataaaataaggttataaagaatattatcgggataattagtgaagtttaaatataaatcgtagattagatgttggcgttatattaatgttaaattatttatatttgataattttattaaatgatgttggtattatattagtgttattatttatatttgataattttatttttttagtagatttttttagtagttattaagagaatgtatttgtttttaagaaatgtatgtttaattatttggaggtaaagaattatgatgtttgtattttttttttaaatgattggaaaaaaatgattataagtgtatgtgtgtgtatatatatatatagtatatatgtatacgttatatatttgtgtatatatatatatatgtatatgtagagagagagaatatgatgaagtaaatatagttaaaaaaaagaaaaagaaaaggaaaaaaaggaaaggtaacgattggtaagtttagattgggttaagtaattagaaattagggattaaatgtggtttattttttgtttttgtaaataaagttttattggaatagagttatgtttgtttatttatatattgtttgtggttgtttttgtattatagtagtagagttgagtagttgtaatagatgattaagttagtaaagaatatttataaatttttgatagagagtttgtaatattttgatttagatgaaaagtatatggaagttttttgtagtgtttttataatttaagtgtgttttttaaagttaaaataaaaaataaatttataaaataattttaaaattatttaaaattttaaattataagttttttttagttggtattattaaaaagttattatggatataaatttatgggtagagagtattaaaaaatttaagtttttattaatgggtttataggaataaatagatttaaagataaatgttttagatttgaaattttatattaaatagatgatatgtttttttaagtaattgtttaagaagaaagagataaaatttagaattttttaggttttgtaaagttagttttaataggttgtataaattggtggtttaattatagttttagaaattttaaagtagaggatttagtatagttttagttattttggaagttttaggtaagttttagggtgattttgtaaggattttaattgttttttttttttgttattatttttaattataaaatataggaaacgaggttatttagtattgtggtttaatttgttttttggattttttgtgttttttttttttttatattagataagttttttttataatatttaagtacgatgttttttataacgaagataggagatggatagaatttattttttttgtagttgtaaattattgtatggtatgttttagataagtattagtttttagtagtatgtttattttttggttatatttatatatgaattttaaaattagtagaattagtttgtgtttattaaaagtttaatgaaggaaaattgatgttggtgttttgttaagatagagtagtaaaggaggggtaggtgttttttttttataggaggaagtttatatttttatatgaatatttttttaaagatataaaaaaatttatttttagtgggaagtttattggcgtatagatagtttaataaaatgatatatataataagatagttttttttttgggaaaataaaaatgtatatttaattaaagtgttaaaaaattagtaagggttagaaattattatttgtatatgtaatttttaatttagaaagtgtaatatatatatagatatataattttttaaaattataatttgattataggatatttgtatatttttcggtagattattaaatttatcgtttagttttttttaatattgatttttaggtaattaaaataatttaagaattttggtagagttattagttaggttttataggttgaattaacgggatttatgttgtgcgtttagaattttaagtgtttattagattagattttgcgtaatttaattggaattattagttatagtattcgaagaatttaaatagttaggttcgtttttttagtgaaggttagaattgaatttgtatagtatgattttgatattattgtgttgtaaggttaaaaaaaaaattgtgataagttgaatggagattaggattttttttatttggtgttatgtttaaaagtttatgtttatttagttttgatttttatttttatatatattttttttttatatatttttttgataatatatattttttaagaaaatatttgattggtagttttggagaattatgttaattttatttttaagttgggtggtttggtgttttttttttttgtgttaatgattttataaaatgcggtatatattataggaggaatgggattttgttttttgtttttgtgttaaattttatagagttatttataagtttgttttatttataatatttgttttttgtttaataagattgtttatattagtaatatataagaatgttatgggtaattatatgttgttggtttattgtttttaataaatgtatttttttgtttgagaggtgagtgattatagtaggttttaagagagaatttaaaatgaagtatgtttgtgtagtgagattaattagtaatagtgttaatattaatttttttttgatagaaggagtttgtaatattgatagtttaatatttatttgtgtggtttggttgtttgatatgttaaatttaaggaaggtatggtgtgtttttgaaaagattagggagttaaattttatggggatttttatgttttttgttttttttgttagattaaattattttagttttgttaatatgaaagtttttttaagatattagtgtatttttgagtaaatttatttaatttggtattatgtggtaggtttgttttagattaatgagttagatattatatttataattttttagatgtttaaaaggaaatattatggtggagaatgtatgttagttatggatggaaaatttcgtttataatagaatttgtttggtttttaatttaaatttgaaatttgtataattttatttgaatatttaattttattttttttttattataaaaagagtgatgttgaagtttttgtggttaatggaattttattataatatagtaataatgaaagttatttgtgaatttaattaaaacgagtagtaagtattaatttagtaagtttggattatgaaggtttgtttaattattgtagttttttaagagattttgtatagggtttagaagagttttttttatattgtgggtaatgtaaatgttagttttttgtgtttgtttttttttgttatttttttgattgaaatatatatttaaggatttaattaaagatgttttttttttttgttgttttgtattttataatttagttaattgaatattgttttgattaattttaagtttatttttattatttttttatttatttatttattagttgttttgttgaattaaaaaaatgtagaaaaaagaaaaaaggagtagtttatattatttagattagtggtgtttaatataatgtaagaatggaattgttttatatgtatattatttaatatggtagttagtagttatatggggttattgagtatttgaaatgtggttaatgaggttgaaagatgaaatatttaattttaataaatttaaatttataaagttatatggttggtagttattatattggagagaagaaattgaaaaagttaaaaggaaagtataaaagtatgtatttaatatttattatatttattttttagtggaagaggaagtagaagttgtattttttagatgattatgttattgaaattttgaatttaattaggttatgtttattaatatatttacgtagtatttgaaggtaaaaagaaaatagaagatatttttttgtttgtgttttgtttattatttttgtggtttagaatttttgtgaaaatgtgagggttttttgttgtagtttttaagtttttattttttagttttttgggtatttgtagaggttttattaggggatggtttttgatttttatattgttattttagagagggtttagagtaagtaggagagttagttttttgttttagagttatttttggaggttgagtttagagtttatttttttaatatttttaattattttagaagtatttaattttttgtattaagttttttttagtttatgtatttagagtagtttgttttttttattgatattatttgatgaaagtaattaagatgatatatgtgaattgaaattttttaatttttgtgatattaaaaatgtaaagaatgtagttataatttttttgattatttattgtgttattaatattatttttaattttataagagtttttttttattttgtaatttttttttttattttttttgcgtatgtatttattgatttatatttatgtattgggtaatttaagagatattaggagtacgtggatgtattaaatatatagtttgtatgttttgattttagaatatgatggagaataaaattaagttattataatatagtgggattaaagtcgtgagataaaggcgtatagaagtatagatggggagaatttaatttaagtgataattatgtaaaattttttgggtaaagggatatgtttaggtagaaaataaaataatgagtaggattaattaggtaaaagtaggtgggatgagagaagagtatgttttagatagatttgatttttttaagtatgaaaataaaattgtaaattttagtaatatagaggtattttagaggtttttgttgtgttttgagatgaagataaatgatttataatttataggttatttagagttaattttagttttgggataagtgggagtttggattttagtaatgtttagagcgattgttggatatgtttttagaagtatagtagggtttatgtagattagtagaataaagaaaagaaaatgatttttattgaagatatgtacgttttttttattagagagaaaggatttagtttttttttttttaaagtatgtatattattggtaaaacgagtaatttaattattttaaaaagatagtattcgaaggtttgttttattaaatgataagattttttaagtgaaattttaatgtatttgaaaataatttatataagaatattatttttataatagatatgtgatatttataatatagatgatgttatttatgtttgtttttttttatttggggggagtttaaaaagaattttatttatatatgaaattattttggagatttaaaataaagtgtataaattttataaatttaaataggtagtttaatgtaatttaatgttattatatgtaatagtttaattggataagaatatatagaaggaagagtaattattttttatgttttattagtttttttttaatttatttagattgttatatatatattaatttataagagtaatttaaatattttgtatttttagaaaattgttttattaagatgttgttgataatgtatttttattttattaagaggaaatagatttgttttatttttaatgttattgaatgtacgtttataatttatagaatgttttttttttgtttttttattataatagaaatgtatttatgtttatagaaaaataagaaatttatatttaatttatttattttaaagaggaaatgtgatagattaatatgtaaagaatatattataaagagaatataaggtaaaaatattagaatggtattttttgttggaaatagaggatattaaatatttttggaggttatatatttgttagatataaggtaagttttttttatgaagtgataagtttttttttttttttttgggaaatgtatttgttgttgttttttgttaatgagtaaaattagtgatttttttagtttagaaaagatttttgattattgtttttatcgtatttttatttagaggattaaatgaattagtgataataaaatgtttttgtgttttaggttttttatttttcggagtttatagattatttaataattaaagtagggtagtagggggaggtcgtttttgtttttgttgttattttgtgttttttttcgttggttttttagtttttttcgggtattattattattatattttttatggttaagtagttagaggtatggggtttttattttaaattttacggtatgatgaaatgtaggggttgtttttttggggattttaaagtttttttttgtgggtttagttgagggttaggttaagtagtatattttggtagtaggtatttgtttgtttttacgttatgatttttttaataagggggagggagaggaagggaagcgggaagaggagagatagttttagaaaattatttttatagtggtaagtaaattttttttagcggtttgatagattatgaggttaatgtaaatttaatgtttattatattgatggttttatcgaattaattcgattgagtcgtgagatagggagtttttttttttttataggttgaggttttatttgttgttttaaagagaaaaaataaagtaagatttttttttgtttagattttttataaagaaaatgaatttgtataaaaaaaaaaaaaaaattgttggaaaggtcgtattttttgtttttttttttttttgtaatataattatagaattttaaaattaattttttttaatatagaaattttgttgttataattgggagatattgttatttaaggtaaataaagagtttattttatttaaagaaagtttttatgtagaaaagttttataagatatgattaatattaattatttttataagttatagatataatttttattttggaaagaaattagtgggtagggattgttttttaaaaatttaaattattgaatatgattaaagttaatagtttaaaagtagagttggttttttaatataattaaaatttatatattaatgtttttttagaaaatagaattatatttcgttttttgtgttattttttaagaatagatatttatttttttatgttagtttatatgtaagaagaataagttttttaaaatgatgagaaaattagtaggaaatgataaatgagaaataagtaggttagttagatgtatggagtattcggaagagtaaggaatattataggggattcgaaagtaataaaaaataatatattttatgaatttgaagaattattgtaaaaattattagatgtagatagatatatatatgtatgtatatatatatagtataaagaaattaaagtataaattgttaattatttagtttatttttggtaaaggagggaataattagatgtgtagaaagagggaaaaggaggtattatatgatataaattagtattttttatatttatttttttattaaattattatttatttttgtgattttttttttttttagtaaagtggatgatattattttattaatattttaaaaagaaaaatagtatttattggagaattagtttttttagtaattgttattattgttttattatattattatatatataaaaatttaagatttgtatattaggagatggaaatgtaaattatattggtgtgtatatatatataaatataaaggttattttattggaagtttttatggattttttaaagcgtatgggaatattatgttaaatattaaatatatattatagttagtttggtatatgaaagtaaagttattttaaggtaatgatttaaaattgtgtggtgtttaggtagtttgtttattttttttaaaaagtatttattaaaatttttcgaaaattgatttaagattaatgtttagagttttagataggtatttattttgtcgggtttttttttttttgttgtttgggattttattttattaggttaggggtttgtaataggggtaaaggaagagatatagagtttattttaatattgtaatgtaattttagagtaaattagtaaagttttatgtataaaattttagaataaaataaatataatatatttataattttatttatattattaagatttgtatataaatgttttttatagtattatttataatagttaaaaagtggaagtaaattttatatataattattgacgaatgaatgaataaataaaatgaaaaaagaatatatggaaatattgtttagtaatgaaaagaaatggaatattaaagtatgttatagtattaatgggtttttataatattatgttaagtaaaataaaaagttagataaaaagattatatgttgtatgattttattatttatatgaaatgtttagaatgagttaatttatgtagggaaagaaaatagattagtggatatgtaggattgaaggaattggagggaaagggaagcgattgttaatggttatgggatttttttgggggtagtgataaaaatattttataattttgttgataattgtaagattataaatatatgaaaaattaatgaattatttaaataagtaaattgtatagtatgtgaattatattttaagaatgttattaggtaaaaaaaaaaagtttttaaatttattagtatatatatgtaatttatattgaataataattaaaaatgtattgattttttttgttaaatagattgtaagttaaaaatttagtgatttttaattattttattttgaatagatttatattgttaaatatgtttattttatttaatggattaagtatatggatcggtattttttaaagtgtgggtttggttttttttttttttatattttattaagattaggattgagtaggtttgaagttgtagttagaaaaatgtatttatgggtattttaggtgattttgatgtaggttgaatttgagagttatgagttatatagtagtaattattttaaattatatgaagtttgagaatagattattaatatataaaaatggaaaattttataaagaatttttaatgttttttttttcgtgttagtttttgaataataattttttatgtaatataattatttaaaagtaataattttagaaattgttagatagtaattatattaatttaaggtttatgagttaattgaaatatatttttttttaggtgttgatgatttagaggaaaatgattatttgaaaaattaaaaatttagagatatattaatgaaagaattggtatttagtgaatttttaataatgtatatagaaggtttttattgaataaaatagaagtgtttgtaatttagaattatttattttttttaaatgttaatttaataaaataatgtattatttaaagatttggtgattaaaatttttagtataaattatgtgttgtattaataagttgggtttttttattttgtgttatgttgttgttttattttatttgaggattaagttttgatttttttatgttgtttaaatttttatttaaggggtttagggagttatgttttataaattataagtttttattagatgggttttatttaattttatatattatgatttattttgtaacgtgattttggtataatattacgagataaggaagaaaattaaaatattttatttttaaaatatgttttttgttatattttgaaatggttttgtaagttattttttgtgaggaaaaatgtatatttgtaaagaatttttattaatatagttagattttttttttttagtttattattttttaaagggtttgaataggaaatatttgttatttattgtttttaatagtagttattgtgagattttaaaagaattttggtttttttaattttttattttaatttgaatattttttttttattgattttaggtttttagataaaaatttagttaattgtttattagaaaatgtttaaatttatttataatttagaagtgttatttttttaatttcgtttttattttgagttgtttcgtttttttgaattaaattaatgttttttttaaatgtatttgattgatattttatgtttttttaaaatgtataaaattaagttgtgtttcgattattttggatatatattttaaggattttttgagggttgcgttatgggttatggttatttatatttgatttagaataaatttttttaaatattttatagagtttgatttttttcgtcgatatatttgtgtttaagatttagtttgacgaaaatatcgttatgtagaggattatttagtttgtaaagtaaaaataaagtaataaagttttaagtttttatttaatggattttattttagttaaggggttttaaataaatttgaaaaattagtttaagttatgataggaaagaagggatagatatgttttttttttttggagtttaggtataattgattagtatttatattagtatagggattttaagattgataaaatagattttttgtagtaataagatatttaattttaatttgatcgtagtatagtattatatgatagatagtaggttttgaaaaaaaaaaaagtattttattttaaaatatatttttttgatatattttgagatagttttgtaaagttattttttgtggggaaaatttgtattttgtagagaatcgtttttttttattagtttttttttagagaatttgatattttttaaggtttaataagaggtatttattatttattttttttgaagtttgttatttggaggttttatttatatgataagaattttggtttttttaattttattgtttttattttaatttaagtatttttttttgttgattttaatattttaggtagagtttaatttttttaattaatcgttaattaggaaatttttgaatttatttatgatttggaagttttttgttttgaaatgttttgtttttttaggttgaattaatgtatattttttatgtatttatttatatttttgtttgtaatttttttttttttaaaatgtattgagaagttgtaatttagttattttgggtatatgtttttaggattttttgaggttttattataggttacggtttttaattttggtagaataaatttttatattgattgagatttgtttttaatatttattggtttataaattttaatattatattagatgggttttttatgtgtaattttaaaatgtaatgtttttattgtaaaagaatttagttgtaaatatatgttttttaataggtagtttaaagtttttttagggagaagtattgaggtagaggtgaagttaggagttgagtgtaatatcgacgaagggagtttaggtattttgttgtttagtaggaggggaaatggttatgttttagtagaaagaggaattaaagagttttttgtaggtgtcggtagaatgtgaattgataaagatttttaattttatttttttgaagaaatatttttcgtgtggttttttagattttaggtttaaaatatatatattttttagttaatttgattttagtaaatattttattttaatatagtagtagatttatttgtttggatttttgtttttattattattttttttttttatatttttttattttttttttgaatgtgttttttttaagttttgttgttgttgttgttgtttttatttatttttatttttagttttagtttagtttagttttgttttgagatagggttttatttttgttgtttatgttggagtttagtggtgtaattttggtttattgtagttttaattttttaggtttaagcgatttttttattttagtttttttaggaattgggattataggaaaatatgaatagatttatattgttaaattaaggcgtttgttatcgcgtttagttaatttttttgtgtttttagtagagatagggttttaacgtggtttcgattttttgatttcgtgattcgttcgtttcggttttttaaagtgttgggattataggcgtgagttattatttttggttgtgtttgggtaatttttgtatttttgtagagatggggttttataatgttggttaggttggttttgaatttttgattttaggtgatttattttttttttttttagttttttaaagtgttgggattataggcgtgagttatcgtgttgggataattttatttttttaggttaataataaagagcgaaaggaaagatggtgagtttagtaataaggtaataaatataggatagttaaggaagatatttttttttgagatatggttttatttttgttatttaggttggagtttagtggcgcgattttagtttattgtagttttgattcgttaggtttaagcgatttttttattttagttttttgagtagttgggattatcggtgcgtgttattatttgtaataggtatgttattatttgtagtagtcgttatttgtagtaggtagataaagtaggattttgtgggtttagtgattttggaaattatagttaggtttttaaagttttttgagaattgttatattgaagtgatattgtattttttagtatgaaaataaatgtgaacgttaatatttattttttatttttttatggttgtaatagaaagttttatgtattttgtagattataattataagtaaaggttaatttttttttttgttaaaagggggaaggtttgagaataaaattttgttttaaaagaagatttttggatcggcgtggtggtttatatttgtaattttagtattttgggaggttgtagcgggtggattgttttgaggttaggagtttaagacgagtttggttaatattatgaaattttatttttattaaaaatataaaaattagtttggcgtggtggtgtacgtttgtaattttagttatttgggaggttaaggtaggaggattatttgaatttaggaggtggaggttatagtgagtcgatattgtattattgtattttattttgggttatagagtgcgaatttgttttaaaaaaaaaaaaaaaaaaaagaagattttatagggtatttgtatgttattaatgagatcgaggtggagggttcgatttttgtttagggtataatttgtcgtgagtatagaacgttttgttttattattaaaggtagaaatgtattatttattttgtataggtagggtgttttagtttttacgttattgatatgtagggtttatttataagtttttgttgtggggggtagttttgtgtattggaggatattagtaatttcgatgttagtagtatttttatttttaggtgtgaaagttcgaaatgttttaaaatattgttaaatgttttttagggataagaattgttttcgggttgagaattagtgatatagggtatatgtttataaataaataagtacgaaattattattattatagggaaaggtatttagaataagtttttttggttatgatttagaatttttatttttataatattgattttttaattatatagtttagatggaaattttaagaaagggttaatttacgtaggttaggagagaagtaatttattgttatcgtaatttaaaggatgatagaaaagagtaagtaaaatatatagtaagtcgtattaatatttgaaaataatttgagagtttttaaataatttttataaatttaaattgttttgaagtatatttttatgataattttggaatttttatgtaaaaaaaaagtgaatttttagtttttgagtgagttgagtgtattgttagtttagaaattattttagagatatttttttttttagttataagtagtaagtaagtgtatttcgtatgtttaatttttttaagaaaagatttgggattttattagggtgagtgatagaggagaaaatgaatcgtttgagttaaaaaagtattttaaatttatattttttaataattttttattttaatattttgatatgttttatgtagtttgggtattttattagggataaataatattattagaattttttatttttataaagtatttgaaatttagtgagtttattaaatggtatagtgttataaattgataaatgttataaatttataaattgtataaatgttataaattgataaattgtataaatattataaattgatagataaaataattaaaataatgtttttaggatgaattaattttcgtagtggaaaataatttatatgtttttaaagtgaattaatatgatatattaaaatagaataattggttaggcgtagttgtttatgtttgtaattttagtattttgggaggttaaggtaggtggattatttgaagttaggagttttagataagtttggttaatatggtgaaatttagtttgtattaaaagtataaaaattagtcgggtatggtggtgggtgtttgtaattttagttatttgggaggttgaggtaggaaaattgtttaaatttgggaggtcgaggttgtagttagttgaaatcgtgttattgtattttagtttgggggataaggtaaaatttcgttaaaaaaaaaaaaaaaaaagaataattatatggaaattattgtgtaattgaggaaataaatttaattggatgaagtaaatgttataaaaatgtaataaatatttaaataattatttgttataaatttagtttaaaataatgataattatttaaaaattgttgtatttaagttgaggagttaaaaattgtttgtgttaatttttaattttttatatttggattattgtttataaaagtaatattatagaaattatatttattattaaatagtaatattattttaataatgtttttatgaatttttaaaaggtttatatatgttattaaatagttagttttgatatatatattttttatttttttataatttcgttgatgtttttgtttagtaaatgtaaagattagttttgtgggatgttaaagaatattattagtattaggtgtattttaggtgtttagtaaagaaaaattgaatttaagagagaatagttatttagatattttttttttgatataaaggattaataaacggatagtttttttaggtagtattttttttattagtttttattaaaatggttttaatatagaaaggtgttaagaagtgaaaatttattagatatacgttttattattttcgtttatagtttttttaggaacgatatttaaatttttttagtgtttagagtatttataaaagggtcggttttgatttttaagatgttttataaattataaagttaaatttattgtttatatttttgatggtgagaggtaggtatggatggaagtattgagggaaaataaaatgttagggtttattaattttaagtaagagcgagaagagttttatttttattgttgaggattttatgatttagggagttgatatacgtgattatgtttagggtaatatattttgatagtgataaagttagaatttgaagatatgttttattatggttagtttattattatttttagggatttattaatgagttattttattaatatggtttatagaggtgggatttattattattatttttatttttttttttgttttatttgttgttatacgttttattatttttttatattaatgaggataagatttttgtttttgtttatattagtatttttaagaatattttgtataagtaataggtatttagtgtacgaatataataataaaattgtattaatttgagttttaatatgtttaagttttttaatttaaaattttttaataatggtaataattattttaaattttgtttgtataaaatggtgttttaataagttttatttattttttagttatattttttgggtgtaatagtttgttgagttttaatttgggggttgtagtggattttttaggaagttaattaagtttaaggtggttttttatttgtaggagttttttttatggtattggaagagatttaggaaatgtgtttatatgtaaattataaaatttgtaaaattaatttattttttttttgttaaattatataagtttgtattttatatgtttaaattttgtagaagtgataggttttatatttgataatgatttgtttagtgttatttgtgtttattgtttatgatagttttttgggggatttataagtagtgtaatttttttgagatttgtaattttttttggaggttttagtttttttgggttttttttggtatttttaggtaattgtagaatattgtagtgtttttgagttttgttaaattattgttttggaatgtgttgataaatatatttgttggtgtattttttattttttgtttttgaggagattttgaagtttttttggataattaggaggagaatttgaatatgttaaattatatgtatttgtaaatgagaatagtatggttagaaattagagttagaagatgggttaaatagaataatagtaggcgttttaagaggatagtaaaaaaagagagggttgaagatattttattataaaatattatttgaaaaagataaataggttaggttaaggtgggcggattatttgaagttaggagtttaagattagtttgattaatatggtgaaacgtcgtttttattagaaatataaaaatgagttgggaatggtggcggacgtttgtaattttagttatttaggaagttgaggtaggagaattttttgagttcgggagacggtggtggtagtgagttgagatagcgttattgtattttagtttaggtaatagagtgagtgagattttattttaaaaaaagatataggggttgatgagaatgaattatcgtttataggaggttgtttttttgattatattgttgaattaaagttaaaggagaggtgtagatagggggaaataaaatttaatttgtagttatagagggagtattgggtgaaaaatattttgaaaaggagtcggggtttaatagaattagtttattaatgaaagatattttaaagttttgaaagaaaaattattaatgtttattgttaattaattattttatagatttttatgtaaatgttttttggatggttttgatttgtattgatatttgaaagaaagtatatagtgttttcggacgggagcgatgtttgggaggtaatggtatgtgtgggtatatagttttttgtatgattttttaatattttgggaattttggagtcgttgagggcggttaagttatagaaagtagggttttagtttagtttatgttaggattttagagatggttttattgtggttttttattttttaaattataaaatatattttgattaaaagtagatggtttttttatgttttcgtttttaatattaatgtaaatcgttttttagaattgtttaatatttttatatttattgaaaggagaattgaatacgttaaggttttgaagaattggggagaaaaatgttaaataaaattaattagatattggtaaagtaataaaattgttattttatcgatgggggaaaaaaaagattatttggggaaaattaaagagaaatttttttttaaagttatgtttttattaatgggtagttaagtgtttttaatttcgtagttttatttgatttataataggagtttgtttgagagatagattttatttaaaatttaaaattatgtgaaattaagaaacgattttttaagttgagatttttttattggtttttataaggttatttaataataaaatattttgaagtgggaaattgttcgtataaaattaggtatattgtcgtttttttatttacgtggaataaatttttgtttgtttagtagtttagttgatattttatttatttttttaaagttttagttataattagtgattaaagatatttggggttttgtttttttagggtgtatttttagggaatatttattttagatagtaggtaaagaaaataaggaagtcgttggtattggtttgatgtgtatttattttttatttatttggttttttgtttggttttgtttttgttttttgatagagttttacggtgttatttaggttatagtgtagtggtataattatagtttagtgatatttatattttttgggtttaagtaattttttattttagtttttcgagtagttgggattataagtatgtattattatgtttggttaattttttttttttattaatttttgaaagatttttgtagaggtagggttttgttatgttgtttaggttggttattaatatttggttttaggcgatttttttatttttggtttttaaagcgttgagattataggtgtgagttattgtatttggttttttatgtatatttagtttttgatttttgtttttaggaatgatttaatatgatatatatatttataagaaatagtaaaataatttaaaatggaagttagtaagaagaaataagagggaatgaggatattaagtggaatttgtaaagagtgtgatattaaattatattttattgagtttttaatatttattgaatgtaggttataaatttggattttagttttttaatttttaataggaaaagaagaatttgattaatttttataatgtaagtatttatataagttaaaagtatgaaaggaatttggaagaataattatttttaatataaaatttaaaaataatttttttttgaagttaagaaatattacgttttaataatagaaggtatttaagtatttttattatggtaaggttgaggagttttatagagtttttttttatggtatgttttatataaggatagtattttattaaagtaaagttagtattattaattttatagggtttaataaattgtatgagtataattagttttttgtttatttggattaaattagtttttgtgtttatttatttaattaaatttatttatttatttatttttatttttgagatagagttttgttttgttatttaggttgtagagtagaggtacgatttttgtttattgtaatttttgtttttcgggtttaagtaatttttttgttttagtttttcgagtagttgagattataggtatgtagtattatattcggttaatttttgtatttttagtagagatagagttttattacgttggataggttggttttaaatttttggttttaagtgatttattcgttttaattttttaaaatgttggtattataggtatgagttattgtgtttagttattatgtttatttagaatattgagtataatttagtattattatatttatatttatttatattaagatttgttttttttgtttttgtttttattatttgtttatttttttattgtagttgttttagatttggttatttcggggtgaaagaagaaatagggtttaatttgtagttattggaataggtttatatgaatttattgttattttgtttggatgtttttttagattgaatgtttttggattgagagtttagtaattagatagtggatttttgttatttattttagtaagtgaagtggtgtttttatttttggagttattttggatttttttttttttaattttaattttttagtagattttgtaggttttattttgaaagtatttttttatatatttataatttttgttttattttttttagatttttgtttaagtgtataaatatatatgatttttttattttatttgtcggaaaataaatattttttttaaattttagttttttttatttggtttaatttttttttttggttttttttattaattatagtatttgaattggtttattgcgttttttgtttgttttacgttagaagggagttttatgtgggtatggtatgtgtttgtttttttattttatggtttagagtttataaaagtttttagtatatagtaggtatttaataaatatttagtgtatgagtgaagaaggagatagtatgatatggggttgtagaaaagaagttaatgattttgtttttatgttaaattgtattgagtagtaagtatgatgttatatttgagggatttagtagtgattagaattgaaatggttatagttttttagttagttaaattttttggtattgattttaaaagatataaaatttatggttgtgaatattagtttgagttttagatttttttttgtttttatttttaattttaagttatttagttttagggttagagttgatattgttttcgttaaatttgtttttttggtttttgaagttaaatttggttttatgttttttataggtttgtattaggagggtagatgattttggtataatattttagtataaataaattatatgtgtaattaaaaagtaattaataaaattaagtacgaatgttttttagtaaagataatttgtgttttgttttaaaggaatagaattttataaaagaaaaaaagaaagttgtggtttttttgaaggtttatttttattttatttatttgtatagatatttattttagtaattaaatatgtttttgatttattgttaaaaatttattattatgggaattaaaataaaataaaagtttttttataagtatagattttataaatttcgatttttgtttttattttcgttttatttattaagtgtagaagtagtatattttttaaagaatttaatataaagagtttttaacgtttttaagaagtaaagtttatgaagagtttattttgtgattttttgttttatgattacggtttttagtacggtgtgttgatatgattttttatttgtttattgttttagaatagtttattagttttttaaaattaggggtcgggtgttttatttaaagtttggtaagttaagtttattgggaaatgaatttattttgatatttgtttttgtatagttttatggtgatatttaatttttaaatggttgaaaaaaaataatattttgtaatatttgataattatatgaaaattaaatattagtgtttaaatacgaagttttaatgggatgtagttatgtttatttattgttagattatttatggttgtttttacgttatgttagttatattagtagtttttaatttttttagtattaggatttggttttgtggaatatattttttttttttatggattgggtgaggaggaggagaatggtttttggatgatttaagagtattatatttattgtgtattttatttttattattattatattgtaatatataatgaaataattataaaatttattatgatgtagaattagtgtgagttttgagtttgtttttttgaaattagacggttttatttgggggtgatgggagatagtgatagattattaggtattagatttttataaggagtttgtaatttagattttttatatgtgtagtttataatagggtttgtttgtatttttatgagaatttaatgttgttattgatttgataggaggcggagtttaggtggtgatgtgagttatggtgagtagttgtaaatatagaataagttttgtttgtttatttagtatttattttttgttgtgtagtttggtttttaataggttatggattattaggggttcgaggttttaggattggggatatttgagatatattattataattatgttatatcgttatattgagtggttgtaatagagataattttgttttaggaagtttaagatatttgttatttggttttttagagaaataattttttagtttttggtttaatttatttttttttttttatagtgtagtaaggatttagaatatagttgatgtttattagtgtttattaaaatgaattgaaattgttagtaaaattttgatttttggaaataatttgagattttttaaattattattttgttattttataaagtatttttaatataattagtaaaggttttagtaattataaagtaaatttattttttatagaaagttttttagttaggaaaaattggagaaggtaattttatttgatggtatgttatttagtttaagttttttaaaatattagtggagtaagtagaattgtggaattgtttttttgattttaggaattttagaattaatatttaatattattattatatatacgagtattaggttttgttaagggtagtagttagtaaatattaggaatggagttaaggaattagaaaattgaaagaggttttaatttttatgtttataatatttgatttagttattatttgtatatttttattttataagatatttttttgtattttcgtaaatgtgttaaattgggagaaaatttttttttatattaaagtagggttaaatttgttgtttttttatttttgatttagtagtgatagttaaaagtataggttgatgtattagaatgttttgttgtgaaatgttttaggagtttggtaaattgtgtagtttttttttgttttagtttttttgttaatattatggggataaaaatatatttgtgagttttgtttaataatatttaaggtatttattttttatgatacgagttagttatattttgtttatttagttgtttggaatttttattgtttttattttttggggtagattttttatttttttttatgttttgagttatttatttattttcgtttaagttgttaagtttttttattgaagttattgtaattattgtaaatatttttttatttatttttttgttttttgagtttttataaattggttttttttatggaagttagtatttttttgtatggtatggatttttgttttgtaaagtttaggttttttggaatatagtttttaacgttatatatgatttgaaaagtttaattttcgatgtgaggtttttggcgtttatttttagatgattatatgtttttttaatgagttagtattttaggttttttagatatatgttgagggagtttgtgtagtaagaaatttgattttatttaaagagagatttgttgtttttatttttgggaggtaatttttaaatttgggatgttttgagtggtaggtgtttttgttatttatggtgtttttaggattatgtttgttagtttttgttagttaggaggtatttggtagagtttttttaggttaattggtatgagtttaatttttagagaagtgggaagggggtaggtagagattgattttaattatacgggttatggttcgattaattatgtttacggtatgaagttttagtaaaaattttggatatttgagtttaggtgattttttacgtgggtgatatttcgtgtattttattatgtgtggaaatgtattttgaaaataatggaagtttcgtattgggaatttttttagattttattttgtgaattttttttttggttggtttagatttagattatatttttgtaatagacgtgagttttagtataatagtttgtagtgaattttgggggtatttttagtaaattgtgaaatttgagggtggttttgagaaatgttgaatttgtggttgggtagatattttgaatatatttggtaatttggaggattgtgtttgtttttttttttttttttttttttacggagttttgttttgtcgtttaggttggagtgtagtggtacgatattagtttattgtaatttttgtttttcgggtttaagcgatttttttgttttagttttttgagtagttgggattataggtacgtgttattacgttaaatagatttttgtatttttagtagagatggggttttattatgttggttaggttggttttgattttttgattttgtgattcgtttgttttagttttttaaagtgttgggattataggtatgagttatcgtatttagttaggattatgtttttaattttagaggttggtatagtttggttttatatgattttaagatggagaataaggaagaaggggagtgaggtaggggatagaagggagtttagggtatattaaggtaatgttttatgttttgagtatttgggggttatttgtattgggaattattgggagtttgtttttttttttaagtgatagggaagttatggtattttttatttattattttttgtttattggtatttgagggtagttttcgagggtattaatttttagtatttttagtttgttttttagttagaatagggaagtttttatattatgagtaagtttttagatagagagtggtagatgtagtagaaagagttgtgggtgtttaatgtattggtaagtattatggaagggatatggttaatgttttattgtatgagtttagttatttttaatgttttagatatgttttggtgttttttgtttttttgtaatatgttgtttaatttttttgttggatacggttaaatttttttattttttacgtttttaattagttagtttttttttagaggttagttttaatttgttttagggttatgggttttttttttattttttttgttagtttatttatagtatttttaagttgttaaaattttttttttattgtttgtttttttttttaagattatgtattgtttaaaggttggatttatttgttttttaatttttatgttaaagatatttacgaattgtttaatgaatatttatttgttggatggatgaatttattttgggattgaatgtatgaatgaatttaatatttgtttttaggagtagttttattttagagggggttataaaaattcgaatggaataattgtagttatggaataatttttttgatgaagatatgttggaaaatatttttataagtttttagattatattatttagattagaggattattttttttgtttttattttgtaggtaaagaggtatgtattagaatgttgtggaaatatgattaagagtggatggtaggttgggtatagtggtttatatttgtaattttagtattttgggaggttgaagtgggaggattgtttgaggttaggagtttgtgattagtttgggtaatatagaaagattttgtttttatagaaataaaaaattagtagggaggttaggtacggtggtttacgtttgtaattttagttttttgggaggtcgaggcgggcggattacgttaggagtttgagattagtttggttaatatagtgaaatattgtttttattaaaaatatataaaaaattattcgggtgtggtggtgtgtgtttgtaattttagttatttaggaggatgaggtaggagaatcgcgtgaattcgggaggcggaggttgtagtgagttaagatcgtgttattgtattttagtttgggtaagagaatgagattttgttttaataaaaaaaaaaaaaatatatatttatgtatatattagtagggtgtggtgatgtgtgtttgtagttttagttattttggaggttaagttaggaggattgaatgtgattaggaagtagaagttatagtgagttataattgtgttattgtattttagtttgagcgatagagtgagatttttttttttttttttttttttttttttttttttttttttttttttttttttttttttttttttttttttgtttgtttttttttttttttttttttttttttttttgtttgtttgttttttttttttttttttttttttttttttttttttttttttttttttttttttgtttgtttgtttgtttttttttttttttttttttttttttttttttttttttttttttttttttttttttttttttttttagggttttattttgttatttaggttggagtatagtggtgtaattttggtttattgtaatttttattttttaggtttaagtgatttttttgttttagtttttcgagtagttgggattataagtgtgcgttattatatttagttgatttttgtatttttagtagagatgggattttgttatgttggttaggttggttttaaatttttggttttaagtgatttatttattttagttttttaaagtgttgggattataggtatgagttattgcgtttagtttgtttttagagaaaaataaaaataaaaagtaaaaaagagagtagatggtaggttggaggagggatatttttatattttggttaagtttttaggtagatgtaggtagaaatgtattagaatattatggaaaatatgaataagagtagatattagtttgatatttattgaatataggggagttagtatagaggagaaggggttatttttttgtatataatatgaaatttatttttgataatgattttcgaggtagttttttgggtaacgttgttttgttttatatatataaaaatttgttttttgttttatatatataaaaaggttttaggtggatatgtggatattgtttttgggagattggtttaggtttgtttgtgttttttttatttttttgtttttttttgattaggtattagatttaagtttggtttttgtatatatttttttttgatgagttattaatattaatttttgtttgtattatgaattttaatgatatgtttaaggttagttagtttgttagattggttttaaaatttattttattttatgattaagagatatggttagggacgggggtttatatttgttattttagttttttaggaggttaaggtgggaggattgtttgagtttaggagttcgagattagtttgggtaatatagtgagattttgtttataattttaaaaagaaaatttttaaaaaagagaaatgtatatagattttaatttaaaattatgatataattttgttgagaatataaattttgttttatgttttttatgtatatatgttttaaagaatgtatagagtattttgtaagtagtatgtttttgatatatatttattataataaataaaattttaatggtttagagagtgttataagtcggggtaggtttagaagttgaatagtaaataggaggataagagaattatagtagtgtaaagtagaagatatttttaagtaatatattatatattatagtagtatatagagtagttaggtgagaaattatgaggatttaggtggatgggttagttttttagaaatgttataataaagttttatagattgggtagtttaaataatagattatttatttttttatatttttggaggttggaagttgaaaattaaggtgtgggtagggttggtttttttagaagtttttttttttggtttgtagatgttgttttttttttgtgtttttatgtggtcgattttttgtgtgtgtttatgtttttattttttttttttatgagatgttttatttattttaggttgttattatagaatattatagatcgggtagtttataaataatagatatttatttttttatagttttgaaggttgaaagtttaagattaaggtgtgggtagggttggtgttttttgaggttttttttttgggtttgtagatgttgttttttttttgtgtttttattaggttatttttttgtatatgtttgtgtttttatttttttataaggataatcggttttataggattagggttttttttaatgattttattttattttaattatttttttaaagattttaattttaaatatagttatattttgagtaattgggggttaggattttaatatttgaatttgtagggaagatagaatatagttcgtaatagtagattttttggaatgttattgtttgtttgattttaatgtaggattatatttgattataagtttaaatattatagttagtttagaagggttgtagttataataaaggtaataaagaattattttttttatgatttttatgtggtttttgttttttgatggttttgggtaagtatagttgattataattttaattagtattgttatttttaggagtttaaaaataatagtatcgcgttttaattagtttttttgttagagtgtatgtgttataataatatattgtaagggacggatattaaataggagtatattttttcggggaaattgtaagaaagagggtttaaaatattttaatgaaatggagtaagttgtaatgattattaaggatacgttgagtatagaaaatttaataaagatgaaagaagaaagaggaattaaattaatattagtttttggtaaattatatgaatttcgttttttggtattttttgattatatttaggtttgaggtatttgtagttttgtattaggttgatgtttttgaagtttaagattttatttttagttttgtttttaatgtaggatttataatttttgtttttttttgtaaatgattagatagtggatattttaggtagggatggttttaagggtgagtaaattatagttacgtagggttttatatttagaaggggtttaattttggtttaatgttttgttattattgtttttagatttttaattttttaaaggggttttgtatttttattttttatcgggttttgcgtataatattataggttttggtttttattttcgcgggttatgtagtttttattgaaattatttgattttgtcggtgtagtgtaaaattagttatagattataagaaaatgaataagtgtggttgtgttttaataatattttatgtgggatgttgttatagattggattgtgttttttttaaaattgatatgttgggtttttagtattttggaatgtgattttatttagaaatagagtttttgtaaatgtaattgtttaagatgaggtgtttagggtgggtttttatttaatgattggtttttttataataaggaaaaatttgtatatagatagagatatatatagagggaaaaagatgtggagaaggttaggtgtcgtggtttacgtttgtaattttagtattttgggaggtcgaggtaggcggattatttgaggttaggagttcgagattagtttggttaatatggtgaaatttcgtttttattaaaaaaatataaaaattagttaggtatggtggtaggtatttgtaattttagttttttaggagggtgaggtaggagaatcgtttgaattcgggaggcggaggttgcgatgagttaagatcgtgttagtttgggtaaaaagagtgaaattttgttttaaaataaataaataaataaaataaaataaaataaaataaagatgtggagatataggaagaatatttataagttaaggagagaagtttggaatttattttttttttatagtttttttagaaggaattaattttattgatattttggtttatatttttagtttttaaaattgtgagataataaatttttgttgtttaagtaaagttgtttgtgatattttattatagtagtttgagtaaattgataagagatacggaaatttaaattgtatataatttttatgtgttaaaaaatattttgtttttttggattttttttttattatttaaaaatgtaaaatttatttttagtttatgagttatataaaaataggtagtagggtagatttgggttgtaggtagtagtttgttgatttttattgaaattgtgtttcgaggagttaaagaaattaatgattaatagaaatttttgagtttgtaggatggtagataagaaaagaaataatttgttgaaatgttgaaattttttatgtttgtaagataataaaattggttgaaattagttggaattaatagatttaattggagtttgtttagaataaagtttgttgatattatggtttgaatttttattttgtgttttttattaattttttttgaatgtgatttatgaagtattgtgaagaggtaattatgtttgtttaaggattttttatattttttttttttttttattaattaattattaattttaggatttattttttttaataaaattattatattatatggaattaatttaatgtttattaatgataaattggataaagaaaatgtagtatatatgtattatagaatattatgtagttataaaaagagattatgttttttgtagggacgtgggtggagttgggagttttagtaaattaatataggagtagaaaattaaattttgtatgtttttatttataagtgagagttgaataatgagaatatatggatatagggaggggaatatatattggggtttgttaaaggggtgggggaagggagaatattaggataaatagttaatgtataggtgatgggttgataggtgcgataaattattatggtatatgtttatttacgtaataaatttgtacgttttgtatatgtattttagaatataaaataaattttgtttgtttgttttttgagatggagttttattttgtcgtttaggtcggagtgtagtggcgcgattttggtttattgtaagttttgtttttcgggtttacgttatttttttgttttagtttttcgagtagttgggattataggagtgcgttattacgttcggttaatttttttgtatttttttagtagagacggggttttattatgttagttaggatggttttaattttttgatttcgtgattcgtttattttggttttttaaagtgttgggattataggtgtgagttatcgttttcggttagggatttttttttttaatatggtattttgtagtttttggaatagtaatatagaaattttagttattataaaataaatgtatgcgtgtatgtatatatatatatatatatatatttttttatttttttagttgagttttttttataaataaatttatttttttttgatgaatttgatttgtaaggttaaaattaaataaggtgtaagttaagaggagagtttgttgatataagggtattttacggtttttgtagataggtttttttttttggtaaaattttaataggtatagagggtaagaaagaagagtagttacggtggtgtttttgtttttattataggtttttttgtattttttttttagtattatttttttttttgaagaatttagtgattatggtttttggggtataattttataggttcgtataagtagatgtttttatgtatatcgttttttttagggtttttttgtgaatattgtataagtaggtatataaaatgatgaataaagcgtttttaggatttttttgagatagagttgattttaggtatgagtaagagaacgataagataagtttgaagtatttcgttatgttgtaaaggcgggacgtgtttttagaatgataggtatttatttaacggacgtagtagtgtgttttaaaattttttataagttaaattttgataaattggatattaaaataaataatggtgggaatggattttaatttattttaatattttagaatttatgagtttatagtgataatatataaataagaagataaagttttgttttaaaatagaaagtaaattattaattgtataaagaaagaagtgtttggtagtgtttaggttgatttgttatagagttgtattttagaggtgagatattgtattttttaatttaattattagttaaaaggttttgttaatataaaagatttttttaattttggaaaaaaatagtggaaggtaatattgtttaatgttaatagttaggtggtagatatatgggtaatattttttttttttaattatttttattttttacgtattttgaatgggtgtgtattgttttttttatgtttataaagataattgttgaattttaaaatattaaaatattttattattaagattatttagtatggatgtaaatattgtaggtgttgagatgttggggatttaatttatttaaatattttttaaattttttttttatataagttattagtattggaaaataaaataattagttaagttgatttttaataatttaagagataatggtggtaatatttattatgattattttagtaaagtaaattattttggatgatattttttaatatttaaaacgttggtatttttttattttaagttttttatgttttattttttaaaaagaaagggaagagaaagattagatttggtggttaatatttatgatgtttgagttttgggaggttgaggtaggaggattgtttgattttaggggtttaagattagtttgggagatatagtaagattttgtttttttaaagaaaaaaaaaattaattagttggatatggtggtatgtatttgtagttttaaggttgaggtaggaggatcgtttgaggttaggagtttaaggttgtagtgagttataattacgttattggattttagtttaggtgatagagtaataatttgtttttaaaaataaatatgatattaataaaagaaaagaaaaaaattttaaattttaattttattatataatttttgatgtatatttattagtatgaagagttttttttgttgtatttaataaattttaaagaataatacggttatagggaaaataaaggaaatagaaagaggttaagaatgtttatatttttattattattaatttaataattttttaattagtattagattattttttttatattataaatgttataataaaaaatgaaataaggtttttggagtttgagagaaaataaatatatatatatatataatggagttataaaatttgtaatattgtaagttttttcgttgtaatttttaatgtgttgaagtatttttttagttggttataatgaatattgaaaaagttaaattgatatatttttaaagttatgaaatggtattttagatatagggatgatttttagaggaaaaatgttttatattttttatatgtttaagaagtaaaaatggatagattgtttttgtattaaatgaaattgtggcgtttatttaaaatgtggatattgatatcggcgttgataagttttttttaattttgtatttttttttcgtttttaggtttttttataattggaaattttgatttttatataatttattttattttgtatgttttaggatgaggttgaggggggtttagataatattattttatgaggggaaattgttttaaataaatatattaagtattagtagtaggaatagttagggagaaaatatattttgttttaggttaatttgattatgaaaaagttttatttttaggttagttattatttatggtttgggttgaatagtatagaattttataggtgttagaaattataaattttgtttttttgatgtttttatttaaggttgttttattaggtgtttagagttgttgaaatttttttttaaaattttagtattataatatttaagtttaaaaagtggaggaattgagtttatattggtttgattggatatttaagttttttcgtattggataaatgaaatttttttttaatttttataaagtttttgtttgtttgtttgtttgttttttgcggggggatgggggtggggagttggttgtttttttgagatagagttttgttatgttggttagtatggatttaaatttttgggtttaagtaatttttttgttttagtttttagagtattcggaattaaaggtgtgtattattgtgcgagttttatttaagttttagaattttatttttaattttagataaaaatagaggaaattattttattaaattattttatattttaaatagaaaagtagagttttagagaatgaaaattattgtgggtcggggtttgtatagtgggtaagagacgaagtgttgattgtaatgtgggttatatattttttgtttattttagattttgtgaggtttattggagataaaatattattagtcgtatgggggttgttttttagaaggagtaaggtaaggtagagtaaggtaagggatttagtggtttaatattagaaaggagtagtgtgtttttagaagatatttttttaaattttgtttggtcgagaagggtaagagtatggttgtggaggattaggagagtgggggagttgagagtatgaattgtagagttagatggattggattagaattttgttatttttgttttttttatatgtataatgagaaaagaggaataattattttgtagaagtgtaatgaggtttgagtgattgtaaaatgttgacgagtgttaagtgttaggcgtatttaaggtatttttaaattttttttttatttttataggttattggggaataggtggtatttggttatatgagtaagttttttagtggtgatttgtgagattttggtgtatttattattcgagtagtatatattgaatttaatttgtagttttttattttttattttttttttatttttttttcgaatttataaagtttattatgttattattatgtttttgtatttttatagtttagtttttatttaggagtgagaatatatgatgtttagttttttatttttgagttattttatttagaataatagtttttaattttatttaggttgttgtaaatgttattaatttatttttttttatggttgaatagtattttattatatatatatatatatatatatatatatatatatatatatatatatatatatatatatatggtattttattatatatatatatgatagtttatatatatatatggtattttattatatatatatgatagtttatatatatatatatatatgatggaatattatatatatatatgatggaatattatattatatatattatatatatattataatttttttatttatttattgattgatgattatttgggttgattttatatttttataattgtgaattgaggtatatataaggtttattaagttaaaataatagtaatgaaaatttttacgtttatagtattagaattgggattattaataaaggtgtagggtgttagtttttagaatattattgatttaagagaggtaaattaatttgtgggagttattaattttttattgttttagttataaatatatcgtttgattgatcgattttgagttaaaaggtttgggatgagaaaggggagttatagtattaaaacgattaagtttttagagtttggtaggagttttgagttatttttttttttaattttttttttgtttatttgtagttgttttttgtcgtttgacggttttttgtttaggaggttagagaaggtaaagttgttttttagtaattggagatgtttggttttgtgtgtgggaagttgaagggatatttggtggtgttttttttttttaaagcgttatagtaagtttttttattgtggttaagcggaaatagttaaaagagaaagggaaaatatcgttttttatgaagataataagaagattaggggtgtggaatgggagaaggatgattaggtatagtatagggtatttttaggattaggaaattatggtataagataatgtaaaggtggatgtatgattttatgtatttgttaaatattatagtatatataatagtaagagtaaattttaatgtaaattatggattatagttaatagtaatgtatcgatagtaatttattagttgtaataaatgtattatattaatgtaagataatagtaggggaaatattagggaggaggaagggagggtatgggaattttttattttttattttaaattattatatggttgatgatatttagtatttaatagattttatagggtttgaaatggaatgttttattaggtttaaaattgttaaaaaaaaaaatagtttattattttttaaattttagattgtttaatatttttatatatatgattaataatgtgtattattatgtatgtatattataatataggtaattttatgtataatatttaattaacgatgatatttgtaagaatttattatttaattataaaggttgtgttgagattaatagttttttaaagaaggtggatgggttgagatgatgtggtagattagaaagaaagtataatttagaattttatatagaagttttttgaaaaatagatatatagaatcgattgttttaattattttattattatttggatagggtaaatatattagtttgtatatatttttaagtaatttttatttaagtatagttgatatgaaggtagtttgtttaatagataaacgatgagagaaaagtagagaaaatatttattattttttttatttataaattttaatttttttttataaaatgtgttggaattatgtgattaattttattaaaagtatgttcgttttgtttgtaaatttgtggagtaaaaaaaaaaaaaatttaggagtggttttttattattagaatttgggtttattatttttttttttttttgagtttataaagtatttattagtatagtgtttaagatgtattagaatatttatagaaattatgatttttttttgtttttgaagttttatggatttgtaaggtaaagttttatttttttaattattattttggagaagaaaagggtagggagataatggtgatggatgtagtcgagagttgggattggaattggcgttggtttattttttagtttttgattttaattggttgtattatttaatatttattatgtcgtttttttatcgaggttaatattttagaaaatgttagtttttatttttttaattacgtttgtttaattattattgagggaagtaattataaatatttttagggttaaattttggaagaattttagtaatatatagaaatattgaatttatttaagaatttttttagatggttataaatattatgaaattttggataatttaaatttatatttttagttttgattgtttttgggttagagattttagatgtttatttgtttgtttagtagttttttttgatataattttataggtttaaatttattatgtttaaaatgaattttaatagggttttttttttttatataaggaaaagttcggttgttttttttttagtcgtttttatttaagtaattggtttttttttttatttttttaagaaattggtattagaacggatgtttttatttttttcgttttttgtatttaattttggttaattttgttttttatttttcgaaatttattcgttttattttgtttttattgtagttttatttgagtgagttatttattttttttgtttaaattagtgtgtttgttttggaattagattttcgttttttatttttagttttttttattattttttaaaatattttgtgttaaattatttttttttttatagtttttttggtttttattattgtattttatatagaatataaaagatttgattttttaaggttttgtcgttaggtgttttgttatgatatagtagttttttaaatttttttataggtattaaataattttttattttagtgttattgtacgtgtttttttttttaattagaaaattcgattttttagaagtttatatttttagagaatttttgtaataatttatattttttattttttttagtatagtattttatttttttaaaattatgtaatattatgtgtattaattgagtaaatattgatttttttatttttttaagattttttgtgtttagtgtattaattttgttttatgaaggtacggtttatatttgtatgagtagtattttgtaattttttgttaaataaaataatatttatatataatttatatgataatgttgtatattatgtgtatgagtatatatatatatatatggttttgtatatattatatatatattatatatatagtatatgttgtatagtatatatatgtattatatatatagtatataatagtatagtatatatataagattagtatataagtatataagattataagtgaaaaaattttaacgataggaattaatttgtttttttttttaatttttaaaaaaattattatttaattggtaaataaaaattatatataattattgtgtagaatatgttttaaaatatgtatatattgtggaatagttaaggtagttaacgtatgtattattttatatattaatttttttgtggtgagaatatttaagatttatttttttagtgatttttcggaatataatatattattaattatagttattatgttgtataatagattttttgattttattttttttaattgaaattttgtattatttgattaatatgtttttaaattattttttttttaatttttttaaattttattaaaaaatttttttttggaagaaattatagtagtagattgatgattggttttatatatatatatatgtatatatatatatatatatatatatatatagatataaatatattttagttatgtttatattatattatttttttgaggttagattgagttaatattggagtttattttgtatgtaatgggagtttgtaaatttatttttatggtagggagtattaggtttttagtggtttttgtatgtgaattgtttttatggtttgatgttgaggatattttgttggtaatgtagagaattgtgtatagaaatttttaatttgtttgtttagttttttttgaattggtttgaagtagtgggaagtcgaattatataagagagtttttttgttaagtgatcggaggttagtgttattatttttgttagtggttaggggtgtattggtttttagtatatgagttttttattgttaataagttttattgtatttgagagagtttttgggataggagagtagggaggtttattttttgttttttggatgaggtattgagaaagagatatttttcgtattttgttttttattgattaatgaagggatttacgaatttgttaatttattaattagggtgttcgatttgaatattagtgatattttgattgtaataggaaattttattaattagaggatgtttgatttaatagggtaggagattataattgttatttgtattgttttagggagtaaaaaataagagtgaaagaaagtattaataattaagaaagtatttttttaatttttttagagaaaataaaatttaggaaaataataaaagtaataaggaaattaaaattttatttaaggagtatataattaaataaatgttatttaatattgggtattattaatgtatttttaattttatgttcgtatattatagtataaaagagaattgtaaaaaaagataattaagttttatattgaaattatttgttatattagatgtttttaaatataaatatatgaaggtgatataataggatattaagatgaaatttgtattttaatattgttaatgtgttattataaatttattttttggtattattttggtaaatagtattgaatgttttatgtacggtaaataattaatttaatgtagtttttaaattggtaggttatattaaaatttagttattttttttgtttattgatgttatttagaatgacgtttttgttgtttttttttatagatttataagtaattttatgtaatatgacgttgtttttaaagtatttagaattatggaatttggtaggtttattagtgtttgttcgttttaattataatttttatggaaaaggaaggatttagttagatagaattggagagtttttttaaatgtttttaaaaaaatgtattttggtttgaataagagagttagaatagtttggtgggacgttagttttttagatttagtatgatatgggtagtagtgtagttttgaagaatttttttgtagtatatatagtttttgatttttatttgtgtttattggtttggattttgagagttttgagaaatgaattgtgtattttgttatgtttcgaaacgttaatttaatttatatttttaagtggttacgttaggtaagtatttttttattagaatagagataatgtttgatttattttttaggttgagttgtagttaatatgtgagtgggatcgaattattataggtatagatgtttagagaataggaataatagagaagggatagagatagtgaaggaggttgtattgtttttatatttttataggtagggcgattttagtaagaagtaatttattatttatattaagttttttattttagatttgttttattgtttttttttatttaaggtgttaaatatttattttgttattatgttgtaaatggtattagtaaaggaaatttttttagtttttaagaagggttttataaattaagtgtaataattttttggtttttttttttataatgagaaatttattagttggattattttttttttttttgatatagaaataatttgggattttttttatttttatgtgatagaaagataagacgtagaattaatatataaatttgttataaagagtgtagaaagtatttttttaaagttttaattaatttttttttaaaaaattatgtttgataaatttatgttttttagaaatgggtaaaaaaatgtttatttagtttgttttgttgtttatgttagcgattttgtgatttagtgacgttagatttataaaattaataagttttataaatagaataagaattattttttaaaataataaatgttattcgttgagtgatgtgattgttttatcgtttttttaaggtagggatgtttaattttttggttttttcgggttatattggaagaagaagaattgtttttggttatatataaaatagattaatattaattatagttgatgagtttaaaaaaaattgtaaaaaaatttataatgttttaagaaagtttataaatttgtgttgggtcgtatttaaagtcgttttgggttttatgcggtttaagggttatgggttggatacgtttgttttaagattttagggaaatagaaggttaaaatgataagtatggaattgaagattttataagaaaatgtatatgttttatttatgtgaaattcgtaatttatatatgtaattttttgatttatttttaaaatgtgggggattttaggaattatagagaagttttaaatggatttttttaagtaaattgtaatatataaatatatattttattttttaattaggttttttttgttttgttttttgttttgttttttttttatataattaattttatgtaatgtaatagtaaatttttatttttatagtttatttttggtggaagagttattttttttaaatatgatcgaaaatgtattatgtgagttagtgaaggaaatttagaaatagggtttagttcgtttgggtttttgtatattttatataagaaatgaattttgtaaaattttaaagttgtgaatttggtattttttaattagtataaatttttttttaaatattaggaagagaaagagaaaaagagattttaaagtattttgtaatataatgtattttatatttttataggtattatttttaggttaaaatatatggtaatatataaattgattatatgttgtttgttacgtttagtagagaaaggtagtattttaaaggatttttttaaattttttattttaagaaaggtatggaaattattttattagaaattatttttttcgtggtagtgtgtaaagatagtttatttagatgtataataaagttttaggaaataatgataatagtagtttttattgtaagtggagttgaaaaaagcggtgggttttaattattgatataatgtaattattaagatatttaaatataagaagattattttatgcgtttttaaagtttaatgttattattttaataatttagtgtagaaattgttaagaggggtttttttttgggtgttttaatttatattttttttttttttttagtttttatttttattttaagttttagggtatatgtgtaggatgtgtaggtttgttatataggtaaatgtgtattatggtgatttgttgaacgtatcgatttattatttaggtattaagtttagtatgtattagttatttgtttggatgttttttttttttttattttatttttcgataggttttagtgtgtgttatttttttttttgtgtttatgtgtttttatcgtttagtttttatttatgattgagaatatgaggtgtttggttttttgtttttgtattagtttattgaggataatggtttttagttttatttatgtttttgtaaaggatatgatttttttatttttatggttgtatagtattttatgatatatatgtatattttttttattcggtgtattatatattttttatttttgtaagtaaaatgttattttgattgttttttttttatttaatttaaatggttaattagttatttttatttgtagggttagtaaaaaattaaattttagtattgggtttttatatgttttatttaatattatatattttgattttttttttaaattattttatttggttaagataatataattaatgtgtaattatttaagtatatttttgagttttttttttaaagtggaagttaaaggaaaattaagatatatgtattatgttatttttatttgtataagttaattagagtaaaatggtttttttaaatatgaaaaataaaatgatttgatatatgttaaaaaagggtatattatttgttaataagttttgttgaagtgtgaggggaagggagtgaagttttgtttttttttaatgagatgtttttataaaaatatgatttgtgaatttgtaaggatttttaattgttatataaagatttggattttatttatgtaatacggttatggtttagttagtttttttttttaaatatatttattttttattgtaagggtttattttatatattgttataatagataaataaattattttattttttttatttgtaataaatagagagtttttttgttttatagtgttataaaattaaatgagataatttatgataaattatttgtcgattatggagtattttataaatagttgagtattgttgttaataatatgattttagtgataattataattttagaaatttaagatagagtttgtttatggtaaagaaatttagaatttgtggtgttttatttaaagaaatgtatttttatgagaatattatttttttgtttttagttttttttaatttttttttttcgtttgagattatattgtttgatagaattaaatgttagtagtgatagtggggaatattttaagttggtgttgtttaatattgtagtttttagttatttaggatatttagtacgtgaaatgtgattagtgtagttttttattttcgttattgttgatatattgggtcgatggttttttgcgatggtggttgttttgtgtatggtaatattattacgtagcgtgttgagttgtatttttgatcgtttttattagatattagtagtattttttttttggtagtgataattaaaaatgtttttcgatattgttagatatttttttgaggataaaattatttttggttgaaaattattaggttatagagatggagaatttttattgtatttaatttaagtaaatgtaaatttaaatagtaaatgtggttgatgtttattatattgaacggaattgttttaaaatttattgagatttaaaagataaatgttggacggatggatatttttttttttatgatgtatttattttatattgtatgattgtattagaatattttatgtattttataaatatatatatttattatgtatttatataaagttaaggaaattaaaatttaaaaagaaaatttattgagattatttttcgaaaatagatataatagttaagaaatatgttggaaagtttagattatatatatatatatatattttttttttttgaaagggttaagtatatgttaaataatgtaagtttttattttatttatatataattatttatgtgttgtttttaatttagagtagtaagagagtttataatttagtaaggtataaaaaggtataaaagtaataataaaatggaggagggggaaattattatagtggttttatatttatttttgttatttagggagggaataatgagatgaatagatatcgatgggttgtagggtttagaattaaattaaaaaattaatagttataattattttaagttgtttttgttgggttcgttatgtttgttttatttaggtaaggtttggattgtttataagtagtaggaatgatttgattcgtaagttttttatagatttgcgttgatggttttttattttttttattagatattgagttaaggtaaagaaatttttaaaaaagtgtttgtaagggtttattttatatattgaatagtttagtaattattatttttatttgaggagtgaaaataattttttattataatgggataattgtgttaggttagggaattttatacgttatttaaagttttaaagtgaatttaagtttaaagggaatattgtgtaaaataaataatatttttgagaattttaaaggagattgaattttaagtgtttagagattttaatgtttttatttttggttttatatgtagggagatgatttgaaagaagtaatatttagtatgatgaaaaaattaaattttatattttttttttaaatatttggagagagaatttatttagtttttgatgttaagaatagaaatttaaagtatgaagaaagaatatgggttttaaaaataaaaagttttgtaatgtagtttttaaatgataaattttgggaattttgtttattattttttttgatttttagttgtttatattgtataatgaggaaaatgatagttatttttttgggttattgggagaatttgaaagggtttttagattaatttgtgtatgtcgtttattttatattttttaaattttaattttttttattgagtatggttaattttagtgtttaaaggtatagaaaagaataaaagtttgttttgttttttaaggagtttacgtgagttttaatagttgtaatttatagtttttttttttaaggagatgttaaacgatttggggagatagatatataaataagttatttaaatattggagtagatgaaagaagtttattatggaaatatatattatttattgtgagagtatttaaattttacggtttatataatttatagagaaaatgtttttttaagtgaataattatttaaagagagtaaagtaaataattttaattataaaatagaaattgttaggtatttgttaggtttaaggggtttttttaatggataaatagttataaaattatgggtttatatatgtagttatttaatttaagagattaagagattgaggatgatattattttgttaatttttagtttaataatttagagtgaaaataataataataaaattaaaaatcggttttaagaggtaaagtatgttaagagaaataaggtagatataataggataaatattttatgattttatttgtatgaggtttttagagtattcgaatttatagagaaggaaattagaatgatggttgtggaatggggggaattaattaataattatattgattttttttataagagtttttataagtaggtatattgagatttttaggtttttagagatatagagttaaatgttttatatttttaaattatttatgtttataatatttatttttagggattttttgtaaaaaaaaaaaaaagttttattttgtaaaaaggttatttttatagttaaatttataaaaatcgaaagtagattggtggttgtcgggggttgagggagggggaaatgagaagttgttattttatgagtatggagttttagtttggtaagatgaaaaagtttcggagatttgttgtataataatgtgaatatatttaatattatttaattatatatttaaaaatagtttttacgttgggcgcggtggtttattagttgtatttttaataacgttttaggtgatttgaggttgtagggtttataaattatattttgagtagtaagagtttaattaattaaattgtgaatattgaagtttagtaattttagtattttgggaggtttaggtgagtggattatttgaggttaggagtttgagattagtttggttaatgtggtgaaattttatttttattaaaaatataaaaattagtttggtatggtggtgtgtgtttgtaattttaattattcgggaggttgaggtaggagaaagaattgtttgaatttaggaggtagaggttgtagtgagttaagatcgtattattgtattttagtttgggtgatagaatgagattttattaaaaaaaaaaaaaaaaaaaaaaaggtttttatggtaaatttttaatttttaaattatttatttatttatttttagagatagggttttattttgttatttaggttgggttgtaatgatgtgattatagtttttagtggtaaattttatgttttgtgtgtgtgtgtatggtgtgatttttttattataataaaaaataaaaatgttatttttataataaaagaaaagttgtttattagaaagaagtaatagttataaaatattaattttttttaatatattttaatgatatttttttaaattaaatttttaaatagataattgtaataaaaattttgaattagggtgtttttgttggtgaggaaaagttttagagttgtcgattagatgatattttaggaagatataaggtaatttaattaattgtgtttattttttttattttatataatttaagtgatatggaggtatttgtttattttattttttatattgagaatattgtttttagtttatgtttagtaattttttttttttcgttatttttttattttagtattgagtattaattaatttttataatatgtgattaggttatgtatggtatagattttttagttaagagtattagaatatgttattttaaaatatgttattttggtataaggattattttgagttgagagtaattgagaagtagtagatgtaggaagaattttttgttttttttatttttgtttaaaagtagatataaattttttttttgtaaaggtaatgtaagtttttatttgtaaaaaggttttttttttttatattaggaagagaaaaataatttatattattcgtataataagttttagtaaataagttttatttattatatatttttaggttatttttttataatttattgttcggagtttaaaatttttttttttttgtttatttttttttttataatgtattgttttttattaaaatggtatataaatttttaggtttaattatttttttgagtttttattttttttttgtgaagtttttgtgtatgtgaaattattattattaaataagttttgtttgttttgtttttttgttaatgttttttgtgtattaaatttataggttttaataatagaattttgtaagggtaaaaggaaagtttttttattgttatattagtgtatttatttagatattttatatatgataaagaaaattagtattaatataaattagtaaaatgtgaagatgaatatttacgtgtttttaagagaatatagttatatttcgtttgagagattgtttagttttttaaaatttgatttttttttttttttttttttttatggttatattattaaaagaaaggagaattatattcggaatgaaatttttttttttttatattttttttaagtaatatgtagtttgttttttgttttttaggtttttttaagattttttttttaaagtttttaaggatattaaggtttattttatggtttttatattttattagttataggattttgagagggttattttgtttagtattttgtataataattaaggaaagtgaatattttttatttttattttagaaagatgttttaaaagtaaatggtatttatttatgtgataattttttgtaaattgtaaattttaattaaatgtaagatattaagataatgattaaagattaagttaaagttattattaatatatttggggagaaatttagaagtaataaaaatgttaaattatttttaatgtaagataaggaagtgaaagaattatattgattgggggtatatttttgagagtatagaatttaagatttttgatttagatgattgaatttatatttaatttattttttatatagtattttattatttaaacgaatttttcgtaagtacggggttaggtatatggatggtatatatttaaaatttaataaatgaaaagtgagttaagaaggaggaatgggggtaatgagtttttaagatttaataattttaggttttatttgtaaaaaatatgtaagtaaaaaattataagttatggttaataggtaggaaggattaattaattggttttgggattaaaggaagataaatgttagagaaagttatagagaagaaaaaaaaaaaaagtaagatttggtttttttcggaaaacgagaattttattatatatatatatatatatatatatatataaaagggattggagtaataggtaatgtaataagtgtaaagagaataataaagagatttaatatatgttatatggttgtttaagattcgtgggatgtattaagtcgtttaattattataagaatttatatagtggtttttattattatttgttttatttttttttagatgataaaatcgaggtatataaaataaaattatttgtttaagattatatagtttttaagtagagaggttataatgtgttgattaatttttgaattgaattttagtagttataggtttgttatttgttttttatttttacgttgtattatttttttaaagtattataagtaaaagtaaagaggtatgaaagaatgtggtatgttgaggagtttgggaaaattgtttaatgagaaagaaaaaaatgaattttgagaaaatatatatatataaaaaaaagtagagttatttggaaagttagatggagatttaatataaaggatgttgaaaaatgtgttaaaaatttgatgtgattttgtaggttagggttattacggattattatttattggaatttttttagaaatgtagatttttaggttttagtttagatatattatattagaatttatggaggtggggttcgggaatttgtatttgagtaagttcgttacgggatttttgagtatgttaaagtttgagaagtataaattttaagattttgggatttgtgaagagtaaaaatggagagaaaaattggggttatgggattattatattttagggatagtaaatgttttagtgatattagaggggatagtaaaatagtttgagagatttattagaaggattttgtaggtagttagatagaaaagtaaaggacgaggagcgatgaaggaggattttgagttttttagtttgggtgtttaagatatattaattttttaattaatattaataattttagagagatatataggtttggggagtattagtaagtaattcggtttaggtgatggagttagtgaatttttttagtttttaatattggtgtttaaagattaaattttattgtgttttttatttaaacggtagaagatgtttatttaaattaggatatattaatgttaaggatttagataggattttaaattagaaatagttagtaaaaagttgaatttagaaggataggaatattgtaacggtttatatgtgttatagaaataaggtaagtaaagaagaggtatttttttggttaaaaatagaatttttgttttgttttttaaatattagagagtaacgttattgtttttattttttttagattatggtgattgtgaaagagaggttttaattttattttttaaattattttagggtttgatttatgttgttgttgcgaatgtatgattgatattattttgtaagtttaaatagaatgtaggtaaattagtgttgtttttgttcggattaggaggtaattttttagtagagtgatagttaatgttataatattggaggttttagtacggtgtacgtaaaggttgggagatgttatttttttgatttatgttatttttttttgataaatattatgttaggattgcgtagaaaatgatttagaagaaatatagaaaattttttttatgtatttattttatttgagtttatgtttgtttataatatggttattattaattagaaaataaaagttttaaggaaggttattgtttttttgttttaaaataaattagggagataggtagaggatgtataggatgtatgtggggaatagggtaatatttagaaacgtgaaaatatagtagataattgtatttgtggtaaatttgttttgggttttggaattgttatttttgaagggtttttataatagggtttttcggttattaggggattttttggtgttgttttatttaagagggttaagatttatagttgattagtttgtatagtttagttgtttttttaaaagattttaggaagggattatttttgtgtttaaagagtttttagagaatagagaaggttgtttgtcggtcgtaatgtgaattttttagagtcggtatattgtgtttattgaagtagatgaagtaaagttaaagaagtatttagttttttagaatgttagttttaataagtatttttttgtggaaggatttaggaggaggggagggttatttttagtgtaggtattatttttttatataaaaagggaaaatgtgtatatagttggatgtaaaaagttaatttcgaatgtttgttttttatttttcgtttttttcgaggaaaagttgttgaatatatatttttaaatacgaaagtatgaatttttatagtttaatagtttcgaagttattgtgaagttttttttgggaaatattgtttatttatttgcgattgattaagtttaattatttagttgtgagaattcggagatttgtagttattaaaagatttattttttttagtaagcggaagttagaggagttgcgtttttaaggaagatttcgggaattcgttttttttttttataaggattcgttttagttttataagagaagtttgtagaaggttgaatttgggtgtatttgtaggtagtttaatttttaaatgatttttgtttgtatagtttaggggttgttttggtttttgcggtttttatagttttttttgtaaatagtgttttttatgtggaatttgatatagaattagttatttgtaatgagttaaaatgagtatgatttaattagatagtttcgtataagtttaattttttaattaatagtaatatttttttatttaaattttgcgttttttttaatttgttattatataggaatatatatattgatattaattgagttattgttattaatataatgaatatagtatcgatagagtggttattttattatcgttaaataagttagaagttatttattatatttttttgtgtttaaaatttttagttggggtttttataatttaaggtagagagaaagttttttatggaaattaatataaatatttgttatttataagaatagagagaaaaagggatagagagggagggagggaataattgaatagaaaaaagaaaagaagagaagagaagagaaagagaaagaaagagaaagagagagaaagagaggagaaggggaagaaagaaagaaggaaggaaggaaggaaggaaagaaagagaaagaaaggaagaaagaaagaaagaaagaaagaaagaaagaaagaaagaaagaaagaaagaaagaaagaaaaagaaaggaaggaaggagggaggaagggaaggaaggaaggaaaaagaaaggtaggagggaagaagagaaagaaagagtgtacgagtaagatttataaagtgtatattttaagttatttttttttatataaatggaaaatgaatttatttatattggtagttatgttttgaaaagatttagttgagagaagttttttttttattgtgtagttttaaagacgattttttgatttttgttatttatgatttgagatttgtgaaggtagggttaaatttttttggtttttatggtttatataaataaaagcgttttatttttgttttattattatattttttattaggataagtttttatcgtattttttgtttttataatttaagttgtgtttttttaaattttttttgtttagttatagttattatttaatttataagaggtttttattgtttttttttagtaaatttttttttataattattattttttagttgaaagaattttggtatgaatatagatgttttgttattttattttgtttaattatgaaattttggataaaagggtttaagagattaaataatttatttggtaatatgcgtagttatagtatgatatttttttatcgatttattattttatggatgtgtgtatttatttatggttttttttatttttaaaataatttaagataatttataaagttatatatgattatagttggaaagtatattttaagtgagtgaaaaaaaaatgagataaagggaaattaaaatggggagaaaataaatattgttaaggataaagtaagttttttaaatatatatgattaattttagtatatttgttaaagataggttgtttgatttaagttttagttttttaaagattaattgtaagaggaaaatattattaattgtaaaatttatagtatttataggttaaaagtatttatttattttttaaggaggtataattagtattgataatgtaattagaatgaatgtttttaggttaggtatggtggtttaggtttgtaattttaacgttttgggggttaaggtgggtagattattttaggttaggagttttagattagtttggttaatatagcgaaatttttattttattaaaaaaatataaaaattagtcgggtgtggtggtaagtatttgtaattttaattatttagaaggttgaggtaggggaattgtttgaatttaggaagtggaggttgtagtgagttaatatcgcgttattgtattttattttgggagatagagttagatttcgttttaaaaaaaaattaaataattaattaattaatatttttttaagttttttttttaaaatggtatgatataagagattaatgtttttaataatttttttagagtagttttaacgattaggtttgtaggataatttttgaggttattatttatattgtattgtagtaatttattatttagtaaaagttatttgttaaaggaagatttgaaatggtaaagatatagtttagtcgtgtaattaaggtatagattttagagtatttggaagtgatatatttattaggtaggtataaatattgtttttttttagtggtttttggtattattaggatacgatgagttttatattttattatttggaaagttttagatgtttggtggttttgtttatattttattgttattttatagttagtaaaatttttattagttttgatatttattgtgaaattaaaggttttaatagatatttgtttaaaataaataaataaataaataaatatataaatattaaaaaaaaaagtaatttattttttgtatagatatgtattaaatagggagaagggagtatttgataaaaattttttttagaaaacgtgattttattttttaatttagaagaaaatagaaggtgtaatttagtaaatatatatatatatatatatatatatatatatatattgattatttaaagaatattatgttttgagtagtgaattttataaggatatttttagatttaaattagttggaaaataaatatgttaaggtggttgaatgttattatttatggggtaaggtaggtttttttttattgaatagataaaagattttttgagaaaggtaaattgttttagttttaaataattagtttatatttttttttttaggtaagtgagatagtaagagtttttatgtttatttagttggtaaaaatcgagtttaaattaaaatttttatttatttttttataatgattgtttttttagaaatatagagaaatgaaaagtttttaaagtagattacgtataaatataaattaggttttttaagaggaatttttatgtgtgattcgggagataagtagatttgaattttattttaacgattacgtataaggtggagttaaaattatgaatatagaaaagtaaatgtggattttttttaaatttaagtgagagttttttattttagtagagaatattttgatagtgattgttacggtagagataaagtaatatgatataattttatgtttaatgtttataaatgttgatttattagagattgaaatttaattttgtttttttttttaaatataagggtttttaaattttaattagtattggtgtatttttttagttgttagaataaattttaatatttttaaataagcggtgtttatttttgttttgcgtgttttttgatgaatatattataattttaaaatatttgttagattgtaattattatgtaatgtattttgatttagatggtttttatatgtttaaaatagattttttttttaaaggtagttttatggaattcgtttttaattgtgaattaaataagagatttcgtttgtatttttttttattagatggaagaagaaattaatcgtaagagattagggaaagatttatacggaggtgtattttttttttcgtatgttttttttttgaagtttatagtaggtggaagagttttttatattcgtaaaattgatatggaaaagtagaaatatattgagttattaatttgttatatattggatttaaatttaaataggaattcgtttttttttttatatattgattgtgtattagtttagtaggaagttttgtatgtttttttagtagataggttagtttttaggttaaaataatttggaatgttttagttattataggttaatgattatttaaatgtatattaatatgtttgataaaagtttttagcgtgagggtagaaaacgtttattatgagaatgatagtggttaggggaagtaaattagtgatattaatttatgtcgtttttaatgttggaggttttaattagaattgtgagtttgtattttagggggtagtgatagatggaagtttgtagtaaatttttaattgtttaaattattaatttatttatttatttgtattattattagaagggattttgttggaagtttttagtggttttttaaaaattttaggattattttttggttatttaagaaatggtgttttgaaattagttgtttatgtagttatttgtgagttttttttttattttttttttaggtttttatttttttttttttttttttttttttatttttgtttttgtattagagatgatagttattttaatgtttttttagagtaataatggatgaattatttataaattatgttatacgtttagttttaatttaatttttaattttattaatttttttaagatagattttaggtcggttttcgtggtttatgtttgtaattttagtattttggaaaggtcgaggtgtataagtggtttgagtttaggagtttaaattagtttggataatatagtgagattttgtttttataaataataataataataataataaattatttaggtatggtggtatatgtttgtagttttagttatttaggaggttaaggtaagaggattatttgagtttgtgaagttaaggatttagtgagtcgagatggtgttattgtattttagtttgggtaatagagtaagattttgttgttatatatattcgtgtgaagaaattattaaataggttttgtgtgagtaataaagttttaaaaaaaaaataaaaaaaaaaaagagagagagagagaaagagagagagattttatgttttattaagtataaaacgttaaggttatttataattattttgtggtattatgttataggatagttggagaaatttatatttagtggtttatattaattatgttaatataatattgtatataagatggtttttttaaaagaatattagttgaaattttatatatattaataattttttttcgtatgtattttatataaatgttaagattaaaatgttggtttaaggaaataatagaatattttttttattttttttaatgtttatttttatattatatttatttttttttgaaaaataaagatatgattttatgtaagtaaagatatgtatttgtggaaataataatattaatatttaaaatgaaggggaattaattatattcgatttgagatattttttgtataaatttttttttttgaattatataagtttgtattttttttgaaattattgttaaacgtgatttggttgtgaagttattgtttgttttaaaggagattaataagttggataatagatgtttggtgaatagtaatattatttttgaaatgtattatatataaagttaagagatattgtataagtattagtaagtattgtaataggtttaaagtatttaaatatttaaaattttgatttattatatattagaattgtaattagataaaaaacgtttatttttggtttttgggtattggggtatggtgtatttttatgtatgtttgagtttttattttgtttttaagaaatgttttttttgggttttatggatttatagttattattatataaattatagaaagtattttatataaaataaaaatttttatagttatatttagatgtgttttagaggtttggtttttattcgataaattttatagatggtaaatgaagttgtttagatttttatataagtaaaattaattttttttatttttaaacgtggttttgaataaagttggaaaattattaatagttaggagttgtatttttataagaattgaatttttattgagattaaagttgtaagttaaggtattaagattgggttttaaattattattttttaatatatatattttaaattaaatggggaataaaagttaagttagtgagttttggtatttaaaggtagaaagataagtatgtaggttttttatagataggtggttgttattaagtggtatgttattgtttgttagatgtaaggttttgaaatataattttgagttgaaagttaaaggagaaattttttttttttttttttgagatagagttttaatttgttgtttaggttggagtgtagtggagcgattttagtttattgtaatttttattttttgggtttaagtgatttttttattttagttttttgagtagttgggattataggcgtgtattattatattcggttaatttttgtatttttagtagagacggggttttattatgttggttaggttggttttgaatttttgatttcgtgatttatttgttttggatttttaaagtggagaaatattttataaagtgaagataagatttatgtaaatattagatggaaatgtattaaagattttatttaatttaagaaatagttatatgttatatttgatttaaaggaaaaattttatagataaatagataatagatagataaatgatagatagattaagatggatggatggatggatggatggatggacggatggatggatggatgaatagggttaataaggaatgttggtgttgaaatggatttataaatatatgtaaaatgttgtatttttggatgaagtattaagtgtattttattagataaaatgtatttgtatttttatggataagagttatttttattattaattttttattatttgtagagtgggaaaatagtttaaagtattgaatattggatagaatttggagaagtgtaatatagagaaaaataatttttatttttgttaatttttaaattttttataattttttttgattttgattattatattttaatattggatttttaaaaattagttgtgatttatttgaagttttttttttattattgtttattatttattattttaaatttttgtagtttgataaataatgttttataagttatgttagaaattgtttatttttgtttgattttaaatattttaagatatgtttttgtattgttagaagaatgtatttttattgttttgtttgggtttagttttgtttgtgtgaatgtaatgttatagaagaggggttgataaattatagtagtaggttaaatttaggttgttatttgtttttgtagaattagtaagttaagaatggtttttttatttttaatggttggaaaaaaaataagtaaaatattataatgtaaaaattataggaaattgaaattttattatttataaaaaatgttttattggaatatagttattttttttggtttatgtattttttattattgtttttgtgttgtaataatagagttgagtagttgtaatagatattttatgggttgtaaagataaagatggttattatttggtgtttttttagaagttatttgttaatttttattttagaatattgtatttaatgaaaagttatattgaaaaggatgatgggatttaggatatattatttaaaatacggtattttggtatattaaaaaaatagaagtaggaaagtttttttgattttttttttttatttatatatatgttttttttcgatgtagggtatatagtttaggaaagtttttttaatatttttaagaagtaggttagaagatatttatgtgagggtttttcgatttttggaagaaaggaatatgtttatttttgaagatgaagggttatagagaggaatttgaataaataggttttgttaaattttttagtttatttatattagattatattttttttgttttattatatttttttattagtatttattttttattaaagttattataaaaatatatagaattaattatttattggagtttttatttatttaggaagatttttatagtatgtaaattttattaaataaatttgtaagtttttttttttttagtttattttgtgttaaaaggatttaagttatgaatataggatgggtagagagaaggatatttgtttttttttattagaaaaagttattgggaaatatagatgttaatatggtttattataatattttgattttgtgttatgattaaatattagggtattttgtttatgaatttgaattttttgttaaatgttttaaattatttttaagtgggtttttagggaaattatatataatgaaaaatagaatgtaagaataagtattttttttgagttggaggttgtttttggttggatatattattgttttaggttttaggtttttgaagcgtataatgaaagaattgtattggatatttttaaatattttttttagttttagaatttttttttttattttttatgtaaataatgattttagtggtttgtattatttatgtttttttattgagaggagttatttaatttttaatatagttagttttaggatttatgtgtttgtggtttatttaaatagttttttttttttttattaaatatttttattttagagtattaaataagttacgaatatgagaattgagttttaagattatgagtagagtttaatagaaattgggtaatttatatattaatcgttaatgggtgagtatagaggaattttagaatgatggaaaagagttagaattgtgagattagtaaagagaaaaagtagaaatggattttaaaggtatataaatgttttaatgggtaaagtaagggggagaaggtggttatgtttttattggtatagtaatggggatttataaggaatattgtatgaattttttttttttttttttttttttagatagagttttattttgtcgttaggttggattttagttttttgtaaattttatttttagggtttaagcgatttttttttcgtagttttttaagtagttgggattataggtgtgtattattatgtttagataatttttgtatttttagtagagatggggttttattatgttggttaggatggtttttattttttgtttttgttatttgtttattttagttttttaaagtgttgggattataggcgtgggttatcgttttaggttggaatattgtatgaatttttaagaatggatgaagtaataatatttgggaatttttttagtgagtaaaaaagtaaaaaattaatgtaaagattaagtttattttttatattattttattattagggtttagggtatagtagatgtttagtgagtatttattgaaatgggattaattagattttattggaacgagtaaatgaaatgtatttaaagaaaatgttaaattagaaatataaataaaagggttgaatagttataatattataatatatgggaaaaaataggatttgatttatattatatttggtatggagtaatttgttatttaagagaaaggttaatgaaaataggtttttaaagtaataggtcgggtatggtggtttacgtttgtaattttagtattttgggaggttaaggtaggcgaattatttgaggttaggagtttgatgttagtttggttaatatggagaaattttgtttttattaaaaatataaaaattagttaggtatggtggggggtatttgtaattttagttatttaggaggttgaggttggagaattatttgagtttggaaggtagagttgtagtgagttaaggttgtgttattgtattatagtttgggtaataagagcgaaattttattttaaataaaataaaataaaagtaatgtatattgttaagattggattaatttaaaaatattattagaatggaaatatattacgttttattagtatgttttatattattatagtaatattttattttaaaaagtatttagtgtggtttggattgaaaaaaaggaaattaagataaaaattgtttgtaaaatatatttagatagaatttttaaaatatattattttttatgttaaaggtgtatatttatttttttgattagaaataggtgattttattatttatttattattaaaattgaattattaaaaataagtgattgtaaaggtatttttttaggatagatttgatatattttaaaaggtttggttaggtatggtgatttacgtttgtaattttagtattttgggaggttgaggggggtagattatttgaggttaggagtttgagattagtttggttaatatgttaaaattttatttttattaaaaatataaaaattagttgggtatggtggtaggtgtttgtaattttagttattggggaggttgaggtataagaattgtttgattttaggaggcggaggttgtagtgagtagagattatgttattgtattttagtttggtatatagagcgagatttcgtttttaaattaataaataaatggtttgttttgaattattcgagattgaaattgtgtttagatgttagttttgcgaatagtttattttggagtggttaagggtatattatatttttatgggttaaatgtttttttaatataaaaaataaagaaaagaaaagaaaaattattttaacggaggaatatttaaggaatttattttttcgggaatttattatgtatttttaaatgaagttgaattagaagagtaggttatttttaggttgtatttttttgattttttattagataataggaatataaaagtaagaaagagaaaatatggtttatttgttagaattgggttatagttttgttaggaagttatattatttatagtagttataagggtggaaaaaaaaaaaaaaaaaaaatttagtgtattaagataattaattattaaattgagtaggagattttttataatttttaaaaagttattttataagattttatatgtgtgaggtatataatgagaaaattattggtttttaattttatcggaatttagtttaaattttgtgtaggggatttattggtatttattagtaaagtgattttgtaagaaagttatttattttttttgagtatttatgatatgaaggtggttattttaagatgaagtcgagattaattttatttatatataattttatttttatagaataaaagaaatgtgaaataatagtaatttaagtaagatagaaaggtattttttttttatgtgtaaggttggtatggggttttatagtattaaagagttaggttttttttattttttttgttagttatttttagtttggattttatttttaaaagtattttatggtttaagagagttgttggggtttttgttattggtatgttttttaagaagtagggaaagataaggggaagagaataaatgagtgtattttttagttaaattagttttttttaaaagaggtattttgaaatttttttataatgattttatttgggtaagaaattagttattggttatatttagaagtaatggagtttggggaaatatagatgtttaatataaggtgataatgtgtttaggtgaggaatgagttttcgattagtagagaagaggagaaattagattagtaggtaaagagtaattttttttattagtgttatagagtatatgatgataattagaatttttagatataatgagtttttaaaaaggtgtttggtatatattttgtatttagtaaattatatatttatttttttttataaataaagtaaaattgttgaggattatgtttttaattttttttataattttataaatgtgtagattagagtttgttaattttagtattattaatatttggagttagataatttttgttgtgggagggtttttttgtgtagtataggttttttattagtatttttggttttgatttattagatgttagtaattttttatttttaattgtgataattaaaaatatttttagttattggtaattgtttttgggggaggaaattgtttttggttgagaattattggtttagatttgtgttggataataggtatttttttatattttttagggttgagtggtgtaggggttaaagatttttgagtttatagtgttgattttattatgtggaatttagtatattcgaagttagatgaagtatagagacgaatttttatagttaaaatgtttttttttagtttggttaatatggagaaattttatttttattaaaaaatataaaaattagtcgggtatggtggtaggcgtttgtaattttagttattcgggaggttgaggtaggagaattgtttgaattcgggaggtagaggttgtagtgatttaagattgtattattgaattttattttgggtgatagaataagattttatttcgaaaaattaataaataataaaaataatattaaagttggggatagagtataggtagttaagagatagttagtgagaattagaatagggttttggattttagtttgagtgagacggaaatgaattattaggtttaaggtagatagtagtgtgatgttatttatatgtttgaagggtttttttagtagttatgaggaaatgtgattgtttggggttagagtggaagttaggagatttatcgggttgtttttggatttattttagatagagagaatggtaggttggaggtgggaagagtggttagatgagatttattttataggggttttgaaggaggagttgataggttttgtagatggttattagaagtgattaaaaagtgtgtggtttttagaaaatattatgtaaatttaattttttaaaatatattatcggaaaattgtagtattaatattgtttttgatttttttgagttttttgatttttttttttttatatttgtataaattggtttttagagttgttggtttgtaagaaatatagtgtagaagatagggatgtatatgtttttattggtttgttgagtgattatagaattattattaatatgtatatgtttgaatttttttatttgtaaaattgatgattatgtgattacggattattagtaattttattaatttacgtattaagagaaaaagtttatttagtattttatgaattttaaaagaaatgtaaattgtaattatttgtataggtatttagttatgttaatatttaaaggagttaaattttgattaataagtaagatttatttttaaagatttttaaggattttaagttaaagataattttttaatttttgttagttttgtaatatattttagagttttagttgggtttaattgtgatttattgattgatttttgttttttgataaaaaggattgttttttttttttgtgaaatttaaagttttttatggtagttttgattaattatttgtaaaatatggtttaattatttatgatttttagtgtataaattttttttattgtaataattttaaagtaatttaaataagtttgttttaattaaattttttataagtttgtaaaagataattttttgatggaatatggaaaaaatgagtgtttaaataagaagtattattaatgtaataaattattatttttataatatacgattaatacgatattgtataaaaagaatatttatgaaatttaattagttttatagtattatgtgttttatttggaatgatggtatgaaaaagttatttaaaattttagttgaagattaattaatataattaatattagaaaatgtttggatagaataaatgtttaggatattatataaaaagagtaagtggatcgtaattaggtattttatttttgtttagtatttagatagttagagataagtaaagtttatttttattaaattatttaatatttacgtaggaattttgttttattttaaagtaatatttatgtgtatttagtgagtatgattgtggaaatgtattattagaataaagtttttggtttaggaatattattttataataatttattgtatgtatttgaaagattttttataaaataattttttttataaatatgttattttaagattattatatattttttagattatttgttgtttataaaataaggtgtatttttattttaggattaaaagtaatatttatgaaatgaattttatgaaatattattatgattttaaagttttgttttaatgtttttagtaaattttgtaaattttatttatttatataatttgattacgaaatttattttagattggagttagagtattattatatatatatttaaaaaataaagattttggtgtattgggattgaggtaagaattgtattatattaaatatataaataagtaatataataaagtttatagtattttagtgtgtagtaaagaatatttaaaaatggaagagagattttttaatgaaaaaattaaattatttaattagtaatttttataaagaaattaaaatatatgtaaaataatataagtataaatagaatatattaaattttttttggtttaattagagggtattttttttttaatgttttttaatagaaaattataaataataataaaatatagtagtatatagaattattgatatttgtattttgatggtagtggtagttacgtaaatttaattttatatatgataaatgttataaaattatatatatatattgtatgtatattaattttgtgtttttgatattgtttataattatttaaagtgtaattattggtggaaattgggtatatatgatttttttgtgttgtttttgtaatttattgtgaatttataattattttaaaattaaaagttttttgtattatttatataggtataggaaacgtattttagaatattgtttgtgattttggtattaaattagggaattattgttttgtaaaaagaaaaaggaaaaatattgatttattagaaagttatatatatatagatttttaatttaaaattataatttatgtatataatttttgaatatttgtattttaataaatatttaattttgtaaaatttgttgttttttttttttaatgatagaaaatgtgtttgtaagttttattttgttgtcgattttatgatgtaaataaagatatataaaatattaaagattttaagttgtttgaaatgaaaaagggtttgaggtaattttgatggtgtgttgagtagtgaagtaggtaaatgaatattagacgtttcgttaatagttagtagttttgagaaatttataatttaagtattgtggatgtttttgattttaattaatttatagaaataagagtttgggattgggagaaagattttgtattagtttgtttttatatttttataaagaattatttgaaattgggtaatttatgaagaaaagaggttttattgatttatagttttgtaggtttaataggaagtatggttggggaggtttaggaaatttataattatggcggaaggtaaaggggaagtaagtatattttattatggtagagtaggagagagagagagagagtaaaaagggaagtgttatatatttttaagttattagattttgtgagaatttattttttgttatgagaatagttaggaggaaatttatttttatgatttaattattttttattaggtttgtttttttaatttgatataagatttgggtaggtatataaatttaaattatattagattttacgtgaaaagtttttttttatttttttataaaatatatgattatagataagagatttaatatttttatgttttagtttatttattagtaaagtaagtttaatagtaatattttatgtattaggttattggggtaattaaatgaaataatagatatatttaatatataataaatatttggggtcgggcgtggtggtttatgtttgtaattttagtattttgggaggttaagacgggtggatcgtttgaggttaggagttcgagattagtttggttaatatggtgaaattttgtttttattaaaaaatataaaattagttgggtgtggtggtatacgtttgtaattttagttattggggaggttaaggtaggagaattgtttgaatttaggaggaggaggttgtagtgagttgaaattatattattgtattttagtttgggtaataagaggaaaattttattttaaaaaaataaataaataaataaaattgtattatgatttattattttgaatattagaattgttgtattttatataattaagattttggtgatttttttttttttttggttgggattttttaagttaggttatgttaggtcggaataggtagtaaagttagtagaaattattatttaatagttaaaatgttatgatttttagttttttgaagtttaaggtggagatgaaataaaattttttattttttatgtttgaacgtttaaatttttaatatgaaggatattagtattgatagagtaagatgatatatgtttgtagttatgagaaaagaaaattgaattaaaaaatattttttagaaaatatttttataataagtttattgagatataatttataaaatttatttatttaaattgtataatttgagtatatttagaaagttatgtaattaatattattatttaattgtagaatatttttattagtttaaaaagaaatttgtatttatttgtaattatttttattttgttttttttattatttgttttattttggtaaatattaaatttgtttttgtttttatttatttgtttattttggatattttatataaatggaattatataatatgtgtttggttttttgatgttaaatgttatagtaattttgttttatgtatattgtagtatatattggtattttatttttttgattgttagttttagttatatggatatattatattttgtttatttattgttaataatatatttgaatatgtttttttttagtaatagtttaattataggattttttttaaattattaaataaattttagttgtataggattggtaatttttttttttaatgtgaagattattggtttaaaagatttcggttttatatgaatgttttaattatgaaatttttttagtatatagttttattttttatttttttttagttttaatttttaataatttttatatatttttaggattttagttagttttaatttttaataatttttatatatttttaggatttgagttaattttttatgaatttatttattatttattgagtttcgtacgtttatatttgggtttttatttttttttttatatttatgttttttatagagatagtaaggtttgaagttggagacgtatacgaatagtttagggtgaagttcgttatgatttttggtagggattatattagataaataattagattgggtagaggttaatgttagataaatgatgggcgtggttgaattatcggaaaatgagatgttaggagaaagtatgtaagagggtataatatatttttttataaaattgaaattttataaagggagttattggtttggttataagttaaaagtttagaggggttaggttgattaggggatggttataaatagtgtgataattgtaaaaagtaggggttaggtattgagtatgtagaagttgggggttggggtagggtagttttgaagaattttttatatgatagttagttttagtatgttgtacggtgtgtagatttatataggattggttaaaattttaggtatgtgaaggaattattgggagttaaggttgagaagaagtaaatattagggttatatgttagaggggttttatagttaaagttttttttgttttttttgtgtagagttggtttttgttaggatttttaaggacgatatttgtttgagtatattttggatttaatttgagtgttttaagtttttttttaattagtgatgggaagtaatgaggtattttttaaagagatttagggttgaagtggatagttttagattttggagattaggttaaagttagtttttgaaggttttttttagtattattttggttggaaggttttgagtttttttgagttaggttagtggggttttgttttttggattagaatttttgatatgggtataggtgagattttttttttttttggatgtttttttttttaggtagatgggtaggattttatttttggatgagattaggggatttttagttatttttgtatttgttggatttttttttggagttttattatatttttttttgttgaatgatatgttttattttgtttgtgttttggttgtttaattagatttttttttggggataggattttatgttttttttttatttgtttgtaagatattagtaagggagggtagtttttggtttttatagagaaggtatatttttgaggttatgtaagagtgattggggttttaaaagtgggtatggtaattgttgtttggggttttaaaagtaggtatagaaattgttgttaataggttgataaaaatattattaacgcggtaatatatttttgattattattattattatagtggttaaatttatgtggtagaaatgtgttttgatgttttaatatttattttatgtaattattttataaaatgatataagttttatttatttattttatagttaagaaatttgtagttagggaaattaagtaaaatatgtagagtgataaagttagtgattaattttaatggtaaataatataataggaaaagttataggtgaagaaaggaataagatgtatattcgattttgaaggaatttttagatttataattttaaaaggagagatgaagattggtttaatagttttaaatattatatgttgaggtagtagtagtttagatggatggggtggagtagagaataggaggggagattaggtaaatagaaagtagattgtaggatttttattatataagattttatttttggaaataatatttttaatttagtaaatattagagagttaattaaaataaaaataaaggattagagttttgagaagttttgtgtaggatatattttgatatggtttggttgtgtttttatttaaattttattttgaattgtagtttttataatttttatgtgatgtgagagggattttaggagaggtaattgaattatgggggcgggttttttttatgttattttcgtgatagtaagttttataagatttgatgggtttataaagggtagttttttcgtatatgtttttttgtttgttattatttaagatatggttttgttttttttttgttttttattatgattgtgaggtttttttagttatgtggaattgtgagtttattaaatttttttttttttgtaaattatttagttttaggtatgtcgttattagtagtatgagaatagattaatatatattttgattagtttttttttgtttttttttattgtgtatgttgaatggttaaattttaataataaaagtataaaggatgtagtagagattgtttttagttgtttaattttttttttttaagtgtaaatttttttgttttgttttatattaatttttttttttttttgtaatttaatgttttttatattattggtttatatatatttattaaaatgagaagaaagttaatagttatagagtttattttgaattgggaattaatattaatatattgcgttgagtaaggtatttttattttaagtaaaattttttattaattataaaatgaaaaattttgttattataaagaaatatttggggtaatggtaagtatgtataaataattattatgattagaatgattttttaaaattagtgaggatagtatgttataggttgtttgggatgattaaaaagataatttttgtaaagtatttattaaaatgtttggtttaggatttttaaaaaattttttgttattattgatgtgattttgttgttatttgttattatattgtttttagtagtttgggagtaattttagatttaatattttttagtttataacggataatatttattttagattaattgatttagttttattatagtgagatttaaaagtatttagtattgaaaatattaagatatagtattttagtaatattaaaatataaataaaatttgtagtaaaaggatgtttttttattttgttttttttttgggtggaagtaattttttaatatttgttaataggatgagtgggtaatggtattggtatttttattttaattttttgattggttatttatttttttttatcgtggatagtttgttttttttattttatttaattgcggattgtttattatttttaaaattaattttagtaattattagtattatttaggtttaatgattatttgtttattgtaaaaatttttaagttttttatttattttttgtatttatttgtgaggtttttttataaggaaattttatatgtatgtatatatatagatgtacgtatttatgtatttatatatatatttgtttttaaaatgtatttatagtttttttttggattttgggttttttgttttttttaaaataattgtttttatgttaaggttttgtagtcgttttgtgtttttatttgtattagttattatgtgttgtgttatttatttttattaagaatttttaagaattttgtttattagtattagggatgttaataaattttcgattaatgttggttattttgtttaggttagatgttattttattacgatttatttatgttgtttatatatagtattttttgagtagaagagtaataaaaaaatataagaatttagtatattttaatattttgttttagtagaagtttttcgttagattataatagtttttattagttaagttatttgataataaagataaaataatagtatttgtaataaagttttgttttggtttaaagttaataaagataaagagttaaagtatattaggttagaaatatatttgtttttagaattattattgtaatttttaggtaggattagatagtgggatttttgtaattatataaagattatattttgtattttattggtttaattagattaaatatgaatgttagttaatttggtttttaaagagtttatataagtttaattaattgtatttagtcgttattttaatgatattttttaagtttttttatttttagttttttgatttttttttaaagaaagataattttttaaaagttttaagtaaagaaaatatattatttatgtaaagataatatatacgggaagaataaagataaatggaaattagttttttagattttattatatgaaaagagaaaataggaatagattttatttattttttttaatatagttaggtgtcggtatggaatagttaaggaattagttagtttataatttttaaaatatatattaaattagtgtttaataatggaattgaatatttgaaatagaaattagttaggaaatttattatagattttaattttattaattaatgttttgatattgtaaataattagttgtgattttgaatggataattttgtgttttgtttggtgtaagttattttaaagtaatagatgaaattatagatataagttattatatatttgtttaaatttatagattatataatattaaaagtgaagcgtatgtaaattatggattttgatgatgatgatgtgttaacgtaggtttattttttgttataaatgttttattttggtgggggatgttggtaatgggagaggttgtgtatggtgggggtagagagtatgtggatattttttgtattttttgtttaattgttgtgaatttaaaattgttttataaaataaaaagtttattgaaaaggtttaggaggagggttttttttatatatttgttgtttataagtaagattttttttaaatgttatggaatatttttagtagtttttttattaattaagaaaaaagtttttttgtattttataaatattttatatttaatggaattttataggaaataaatatttgattatatagaaagaaatatatttgtttttagatatttagtttttttatattgttttttttttaaagaaaatgcgattttaattaggaagttttttttgatttttacgttttgatttttatagttttttttttttgttgtttgttttataacgttttgtatttttttttttaggtattttattatatagtggataagtgtaaattatgtgtgttgttttaatttaatgattatatgttttttagtttggaaaagttttggcggtagtgtttatttttagtatatgtttgttattggttttttggtatatagtagcgtgtttgatatagagtaaatggtttttataaatggtattgattgaagaaataaatgaatggagtaggaggttatataaaggaatttaagttttagttattaggttttgaggagttagaaagaatgatataaatagattgagttgatgaaatgttttattttttttggatggagtttttaagaagtaggtttattattttgttttttatgatgtaaatgtttaagagatttggtatgatgatatcgaaaattgaataaagatttgtatttgggattaaatatacgttatttaataaataaaaatattaattatttttttatagggtgtagatatagtatttaaagaaaatatatagaatagtaaatgttagattttttttttttttattattttttaaataatatagtgtaatagttatttatatagtatttatatagtattaggtattataagtaatgtatagatgattttaaatatataggaggatatttgtaggttatatataaatattatattattttattttaataatttgagtatttttagatgtaggtgtttgtcggggtggggaggggaggtagattttgaaatttttagggtgtattataattttgatatattttttttgaaattaatagaattgtgttttttaagtatatttatttaagaagaatatattgttgttttaatgtaattagtagttattttttatttgtatttttaaaattaattggttaggtatggtggtatacgtttgtaattttagtattttgggaggttgaggcgggtggattacgaggttagtattttaagattagtttggttaatatggtgagattttatttttattaaaaatataaaaataatttgggtatgttagtatatgtttgtaattttagttattcgggaggttgtggtaggagaattgtttgaatttaggaggcggaggttgtagtgagttgagattatattattgtattgtagtttgggtggtagagcgagattatgttttaaaataaaaataaaaataaaaaattttagggggaagttgagtgttagatagtttaaaggaataatagaaatgtttaagaaattattattagagtgaataggtaatttatagaatgggagaaaaattttgtaatttatttatttgataaagggttagtatttagaatttataaggaatttaaataaatttattagaaaaaaattaaataattttattaaaaagtgggtgaaggatatgaatagtattttttaaaagaagatatttatgtggttaataaatatatgaaaaaagtttattattattggttattagagaaatgtaaattaaaattatagtgagatattattttatattagttagaatggtgattattaaaaagttaggaaataatagatgttggagaggatgtggagaaataggaatttttttatattgttggtgggagtgtaaattagtttaattattgtggaagatagtgtggtaattttttaaggatttagaattagaaatattatttgatttagtaattttattattgggtatatatttaaaggaatataaattattttattataaagatatatttatatatatgtttattgtggtattatttataatagtaaagatttggaattaatttaaatgtttattagtgatagattggataaagaaaatgtggtatatatatattatggaatattatgtagttataaaaaaggatgagtttatgttttttgtagggatatggatgaagttggaaataattatttttagtaaattaatataggaatagaaaattaaatatcgtaagtttttatttataagtgggagttgaataatgagaatatatggatatagggaagggaatattatatattagagtttgttagggggtggggggtgaggggagggatagtattaggagaaatatttaatatagatagatgatgggttgatgggtgtagtaaattgttatggtatgtgtaaatttatgtaataaatttgaaagttttgtataggtattttagaatttaaagtgtaattaaaaaaaaaaaaagaaagaaaaagtagtatatatatatagtggagtattatttaattataaaaaaagaaatgtttttaagaaaataaatgttaattttattttaaagtttttgtgaataatgaaaattattaaaggagaaaattatgtaagattaatatagagagaaaataatattaaataattttatatgattttgaattatattgtttttttttttttttttttttgagatagggttttattttgttatttaggttggagtgtagtggtgagattatagtttattgtaattttcgtttttagggatattttttattatggttatttgtaaagagtatgatatgatgcgaatatttatttggttatagtgtattttaggtgatacgtaataattagaagtgttttgaagtttttttaggttttgtatttttttaattgttgtaggtgttgtgtttttaatataggatgttttataaataaatataattaaaaatttattaagaaaaattttagtagaaattaaagttgtatagattaaaattatgatttgcgatattttttagttatattaggatttaattttgtttattttgggaaaggtagtgtgtaatagttgtttttatgtataaatgattgaaaattattatttgtgttattttataatttttttttatttttttgagatggagtttcgttttgttgtttaggttggagtgtagtagtgtaatttttatttattgtaagtttcgttttttgggtttacgttattttttttttttagttttttaagtagttgggattgtaggtgttcgttattacgtttggttaattttttgtatttttagtagagacggggttttatcgtgttagttaggatggtttcgattttttgatttcgtgatttatttgtttcggttttttaaagtgttgggattataagcgtgagttattacgttcggtcgtgttattttataaatttatgagggtttttgaaatttcgattttatagttaattatatgagttatataggagtttagagttttttgagaatttttattttattagtagtttttttgtgtaaagtatttttattaatgggtatttcggtttttgttaaagtgtaagatttatttgaatttgattaagtttgttttttaaatataattaggataagaaaaaggatttaataagtgattttaaatatttatttaaaatgtttgtaaatggtagtattttgatttagatgatattatattattataatttagagaagatttttgagggttatttaatttatttttttggtgaaaataagataaatgtaattcgttaatgatatgttattgttttataatatagggaattttttaaggaaaagaggttatagtgtttttgtaatatgttatttcgttatgttgatttttttattttgaatttttagcgaaattttttaaagttatttaagggaaaaggggtgaggagttgtaagtgattaatttttagattttttgtttgttaatattttattttttgattaattaatttatttagtaattttttttaaaatatttattatgttaaaggaaaatattaaaattagaagagaaaaatataatgtagggattattttgtttgagtgtgaagaaggaagattatatatatattattgaattttataatatttaagggtaggattaagacgatgatataaattatattatggaaatgagtatatagtggggaatttagaatttttattaatgtttgaggagaaaggaaaagtaaagaatggggttggaggagaaatttaagtgtttaataaattttaaaattattatgttgaagaggaatttaagtgtttaatgatagttttaaattttaaaattattatgtttaagattgttttaaattattaggttagttattgttatatattagaataatatgtgaaagttattggtaatagtggtaatataagagttagaggaaaattttatattttgagaatggtaagttaatagtaatttaagtttaatagtttttttttgtagatgagttaattggggtttaggaaggttaaaaaatgtatgaattattattgatttaaatataaagaatattttaatagtaagtatattttatttaaagttaaaggttttattttatatgttaggttattatttatttattatgggtggtaagtttttagaaaaattaatgttttttttttttaaatgagatgaataatgtttttataagataattatagagatgtttatgaaaattatttgtgattatttaaggttaaggttgtagtttagttggtaagatgttaagtttagtgatatgattattttgtatataaggagtgatttttaataacgtagaaggttttagagagttttggggttttatttggaggttgattaattttaattaattatgcgattagttatggagaagttagaattttaaaattttttagtaagttttgatataatagtaaagaaaatggtttttagtgttttataaataagagtagtttaattaatttttatattgtatggttgttttaagtttttgtaaaggtataatatttatgtaaagaatagaatttatatagttgtttaatgtaaggttatattaaattagatttatatattaaaattttatttgggagaatatgaaaatgtaatattgttaagtgttatttttagtataattttaaatttatattgaaatatatgattttgttttttacggttgttatgataaagtattataatttagggggttgaaagagtagaaatttattgtttttcggttttggaggttggaagtgtgagattaagttatcgtaagattatgtttttttagaaaggttataggggaagattggttttatgattttttttgagtttttggtagttttttggtttgtggtagtattttaatttttatattcgtgtttttatatttttgtatgtttgtgttaaaatttttttttttagtaaggatattagttatattggattaggggtttatttttttttagaatgatttattttaattaattatatttttaacgacgttatttttaaataaggttattttgttattttttgaggaattgggggttaggatattaatatatggagttagaggtgtattatttaattcggaagcgattaaaataaattaaagttatgggataaatattatattgttttagttatattttaatttgtattttagttaataatttatgtgttaatatgtttacgtattatttttttaatttgttttaatttattattaatgtttatttttttattttggtttttttgttattttttagtaaatgttagaatatggtgttttgtaataatttatttgtttattttattgataatggtttttttttttataaagtattttaatttgatagtaagtgggtgtattataagaaggtatttgtaatttataatgtaaattgtttagaattaagtagtttagttttggtgaaaattgattgtttgaataaatatggaagaattatatcgttataatgaggtgatttggttaagtatataattttttttaggtgtaattaatttatttttaaaatgttgtattttttggtgagatttttagttttatgtttttgatttttgttttatatttggattttgattattaatgatttatttttttttaggagatttattttttttttttgaatatatatgtttagaggaattgataatggtttttttatttgttaataaggtggaattaaaatttatgttttaaaagatatggtagttagatagtgattttagtttttttatttgataaatgagtttattgattttaagtgagtttataatgatgtttttgttgaggatattattattgatttttatttagtaagtttatatttaattaattgtatataatttgaattaaaaagggttgtttagaagaatgtttaagttgggggatggagaatggatagttttaaagttagaatttggtattttttattaagtaaagaaaggtattagagagaagttcgatagtatgattgattgaagtagtgatttttaaagtgtggtattggaattagtgatattagttttatttggaagtttttgtaaattttggtgatatattttatattcgtagaattaaaatttttggggttggagagtagttagttgttttataagttgtttaaatatggttgatttttacgaaagtttgagatgtttattttttttttgttttatgtgattttacgaaatatattttaaatgttttttttttttttttttttttttttttttttttttttttttgagatggagttttattttgttatttaggttggagtgtaacgacgcgattttagtttattgtaattttcgtttttcgggtttaagtgatttttttgttttagttttttaaggagttgggattataggcgtttattattacgtttggttaatttttgtatttttagtagagacggggttttattagattggttaggttggttttgaatttttgattttaggtgatttatttgtttcggttttttaaagtgttgggattataggtatgagttatcgtgttcggtttaaatgtttttttttttttttttttaagtgttttaaataaatgattgagatttttatttagtttttataggtattttattggatttttgttattgagaaagaataattttttttgtaaagtagtaagttgatttttgtatgtgttggtttttttttttttaagattaagatttaaggtaataatatttagggcggtttagatttttttggtttttgttgttttggttttattttagtttttggttatttttatatagaataattgtagaaatatgtaattttttgttggggatgattgtgtggtaaaagtataaagtagattttaaaggtatttttaaattattttattattttttaaaatagatgtttggtagttgtaaagtttgataggtgtaatatgttatatataataagttatttttataaggtatattattgtttggaatttggtatgttgattagtagaggttaaggattaatgttaagttattaagttaattatttatatgtattaagagtaggtggagaggatatgttttcggataatatgagttgggaattattgttattattattataattattaaaaaaaaatttaattgaaaaaacgtatcgtgttttagagataaaaattattatttttatgtgtttttttattgaatattttagtaatatattttggaatatgtttggtaagttttagaagttgttgttttaatggtaaagtaaaatttttattttgttatatatatgtaaattaggagatgtaggatttagtagttgagttttatttgtagtagggaatatttaagaaggggaaaaaaaatgattaaaaatatatgttttttttttttaattgattttattaagtgttagatttttgttatattgtttttttgtgatatatgtttttttattatgttaatttatgttatttattaaagagtgtagaataatttattaaattaaaatagagtattttatagtttattatgttttgatttatattttaatttatttattatgattttgggttattttaatataaattttaaaagatagtgtgttttaatgagggattatttgagaaaatatgattaattaaatgtgatgtaagcgtaaagagtaataattttaagaaaaaattgttttgtaaaaaaataaaatttattttaagaaaaatgtgtttattgtagaattagaaggatgtttgaaaagttaggtatgtttttttagtagaatagatgatttggaattaaatgattttttttttttatataatatttatttaggattttaaattttaatttaaaaatttatttaattttattttatgtattatacggaaaggtgaaatatttttttttttttagagatagggtttttttgttatttaggttggagtgtagtggtttaattatagtttattgtagttttaatattttgggtttaagtaatttttttgttttagatttttaagtagtaaggataagaggtatgtattattaagtttggttaatttttttttttttttttttttttttttggtagagatggggttttattttgatgtttaggttggttttaaattttcgaatttaagtgatttttttattttagttttttaaagtattgggatgataggtttattatggttatttagaatgggaaatttttaagtaataaaagtatatacgagagatttgtatgttatgttttattgattgaattagatattttaaaataaattggaaagagttttttaaattaaaaaattaagtttttaaattttttttggaagtggaggggttttttagattagattgtagagtattggggatttagggttatatattatttattttattttagcgatagggttttatcgtgttgtttaggttagattagaatttttaggttgtgatcgtttttttttagttttttaagcggttggggttataggtatgtattatattatttttgaattttaggattattagtattaggtattttttttgggtttaatttaatttgatgatagttagcgcgtttgtagagttaagtaagaggttttgttttgagtaaaatgtatggtattttagaaaatttaatgaagtagtattatcgttaaaatggaggtaaagggtagtcgacggtttgagagagagggtagagataatagtttttagaaaggaaaagaagtttatttgtaaagaagttttaaaaatagaagattttaggattagtttattaatagaaataatgataatgtgaatttaaagaagaagatgtagtataattaagtttgtatgagtttgtttatagataaaattatttatttatttatatgattatgtttatatgttacgatatatttttataattagggttgttaaagacgtaaggaaagtgaggttttcgtttaggagagagaaatttaatagaatgttataaggttttatttatttagaagatgaaaatttgttaggttaattttgtttttttgtggttattttagggtttaaatttttttttttgattgtgaatggggatgtttatgtttttttataagcgagagagtttatagtattagttttgattttagaattatttatagtagagatgtaagtataggaagggatagaattagggtagggtattagcgatttggatttatagtgtattttggattattttgtaatttttttttttgtggttttttatttttgagttagtgatatttgatattttatttgtgtttgtgtattttagttttttgatatagttttttgggaatgaaggtacgtgttttggttattttggtaatattagcgtttagtaaagagtttgatatagtatagatttttagtgttttttgagaataagaagttaagttatgttatgattgttaggatgtttgttatagagtggaagtaaaatatatatagatagagatagatatagagatagagatttagagatagagatagatggaatagatatggatatttcgatataaatatttatatattgttatgtttggagatattagttttgttatgattgaaggtgggaggtatggtattggtattgagtagggagaggttagggatgttgtggaattattaaaatgtattagatagtttttttatttaataaagaagaatttgttttaaaacgtttatagtgttatagttgataaattttgaattagaaacgtatgtataatatatatatagacgaatatatggaaattaaattttagttttaattttatgaggttatgtaaaaaagtaatttttattttttttttaaaattgtggagtaataaagtgaattagagtatgtaaattttgttttattaaaaataggtttaaaatattgtaaaaatttatggtttttggataatagaaaaatgaaaattatagatggtcgattagtttatatttgtttttttggtgattgtgatatataattagagaatatattttatttagattttttttaaaaaatttttttgtagttgtgaaggtattagtttataatttcggatataaaaatgtggaaataataaaaataattaaaagatgttttttatttttttttaaattttggtttaatgggaaaaaaaaaaatattttttagatgtaggttatttttggaatgatgattattaggtttggttgtattgtttttaaaatggtatagttaaatgttaaaatagaaagggagagggaagagggggaaagaaaagagagattaggagagagcgagaagagagagataatgtatttttatttaaagatatgatgggttgatttggtatagtggtttatatttgtaattttagtattttgggaagtttagatgggaggattttttgtggttagaagtttaagattagtttgggtaatatagtgagattttgtttttgtttttaaaaaataaaaatttaagtttaggtaatatagtgagaatttgtttttataaattgttaaaaaattagttaagcgtggtggtataggtttgtatattagttatttgaaaggttgaggtggagggatttttgagttagggagtttgaggttgtagtgagttatgattgtattattgtattttagtttgggtgatagagtgagattttgttttaaaacgtaaataaataaaataaataaaaatttaaaatttaaaaaataaatgattaagtaaaagatatgatggtattatttattaaggatatatgggatatatattttagattttaaaggtaaagttttagttttaaatgatttttttgttttgaggatatagttttatttttgttatttaattggagtgtagtggtgttattggagtttattgtagttttgaatttttggatttaagcgatttttttattttagttttttaaagtattgggaatataggcgtgagttattatgtttggttttaaatagttttagtagtttaaaatatggaaaagaaaatggggaataaagtgtttatttttaaataattaatggtggatattattttaggtgacgtttttgtttttttttgttatagatgaaatttaaaagaagtatagttgttaaaatatgtttataataattggttttttattttttttttattttatttgaaaggagttagtaatttttgtatgaatttggtatttatggtattaataggattggttttaattttaggggttaggcgttaatgttgtggtgtggtttgtaattttgtttttatgtgggttatttatatggtaggattgttgggtaggaataggtaatttttgatgtttggttgttatagtatttttttatagttacgtggttttttgttttttgttttaggtataattacgtttttaggtgagtagaattttgtttattgggtagaaatgattattaagcgagggataaaatagtagttggtagagataaaagtatttggttatgaagaagaaaaagtggaaattttagcgttgtattagaaattgttggtgtagagtttttagaaaatattcgtatatttttaattgtggggatgattttattattattattcgttatgattgtaaaggattttgtaatttgtattttgcgggagttttattagttggaaagtaaattaatgattttgaaatgtaattttttttggtatattggatttgttataataatattttggatttgtttagttgatggggtgatatatgttaatataagttgtgtattttgttaaaaatttttttttcgtattttaggtttataggttttggttaattttttttttggtatatatagtataataaggagtttatattttagaagagtgttattatttttaatagtgtaggtatttaaagataaggattgggatatttgtgtaagtttagatggattgttttttgtaataatgttttattagagatttaaataagagttaattaattttttttgaatgaattttttaaagaatttaataggttttttgttatttaggttggagtatagtggtataatttcggtttattgtaatttttattttttaagttttagggatttttttgttttagtttttttagtagttgggattataggtgcgtattattatgtttggttaatttttgtatttttagtagagatggggttttgttatgttggttaggttggttttaaatttttaaatttaggcgatttgtttattttggttttttaaaatgttgggattataagcgagagttatcgtatttggtttattatgtgattttttaaatggtaataatatatttgcgttatttttataagaattagggtaatgtgaaatataaaattatatatttttgagtttattaagaaaatattttttgaagtattaataatttgaaaagtaaaaaaaaaattttatgaaaataaaaaagttataatttaaaataaaagggtaaatagaatgtgaattaagagttttgattagttgtcggattttttttaagttttttgatgggtattgttttttagatttttttgaggagaggttttaaagtttcggggattaaagaattttaaaattttatatttttattattttgtttttatgtgtagttttgagaatttttaaaattttttttttgaaagatttttttattgtttaatttttatattttgtagagatgtcggaaagaattataaagtgtaaatatatatatatataattaaaatttaaataaaaggtaatgaagtaagtatgttaggtatattgagttcgtggaaatggttgttatatatatgtaagttataattattatgtataatgattttatatatgttttattaatatatataatagtaatatagttaagaatgaggatatcgtaatttttgttgtaggtagtaaatattttttgtgatgtcgaggattttagttgtttggaacgtttttttaagaatttcgataaaattttgttattttattatatgtatggaaaattggataggtttaaaaaaaagtaattgataaaaataaaaaaagatattttttatttgaaaaatattaatatttatgattatgagttaaattattatatgtaaggatttaaaagacgatttatggttttaatagtttttttttttacgttaataatttgtagtaattttattaaatgtttgtttttttttttagtagaaaataatttttttggttaggtatggtggtttatatttgtgattttagtattttgggaggttgatgtaatagaattattggaggttaggagtttgaaattagtttgattaatatagtaagattttatttttggggaaaaataaaaataaaaataaaaaatttaaaaaaaaagtagttaggtacgggggtgtaatatatttgtagttttagttatttaggaggttgagggaggattttttgagtttaggagtgtaaagttatagtgagatatgattatggtattatattttagtttaggtgatagagggagattttgtgtaaataataaataaaaaatttgtaaagaaagtaattgttttggaggtaagaagtatattttatatatgttggggttttataatttaagatatttgaaagacggttgtgttttgtagatttttattggttagaagaatgaattgggtgggtacgtgtattattagtcgggatggtgttgatggattgatattttttaagttattttttattatattagtaattttttaattgtttttatttgtgtaattgtggtgtaaaattgtttttagaagttagtgagaaatttcgttttagtttttttataattgagtgtttttggattataatataggtgttgttttttttttgttttttttcgttgttaatatattaagaagtggagttatttagtataaatatttaggaatgtgataatgagggtttgagtttttgttatggatttttggttattttatttttaggtttttagtttttttatttgtaaagaaaaataatatttttgattttatagagtagttgtgatggttaaatagatattttatgtgaaataattgtgttagttttaaaatattgtaaaatgtaatgttaaatgttttttgttttgtggtttaggaatttcggagagtttttaatttttattaatttagaagttgtgtttaatcgtaagttaagagatagtttttttttttttttttttttttttttaggtttttttttagaggtgtggttaaggatttttatagagattaattgaaaagtattaagagttgaaatttaattagattagtaagaattagtaagatatatatttttaagtgttgtggtttgaatgtggtattatgttataatgggtatgtttttaatttgttttgtagaataaagtatttgagttttgtggttatttattttttttttaataagtttttaaagtttggttgttagttgggaggttgatgttatattatggttatttaggttatggtttttaataatagattatattgttgtaagattttgtatttatatatatgttgttttaagttggaataatttagttagtagttatgagattttttttaaaaagataaatatttttttttttttgagattttatataaaaaattttatttattgggttgaatttgtttgtttataaataagttttagtttagaatagattttaagttttttatgtatagaggttttagtttatttttggaattgtaataatttattgatattagttgaaataaatgtaatttattaaattagtattttttaaaaaaatatatttttataggtttttggggagtaggtggtatttggttatataagtaagttttttagtggtgatttgtgagattttggtgtatttattatttaagtagtatatattgaatttagtgtgtagttttttattatttattttttttttattttttttttcggagtttttaaagtttattgtattatttttaggattttgtatttttatagtttagtttttatttataagtgagaatatataatgtttggttttttatttttgagttattttatttataataatggtttttaattttatttaggttgttgcgaatattattagtttatttttttttatgtttgagtggtattttattatgtgtgtatatatatatatatatatatatatatatatatatatattatagtttttttatttatttattgattgatgggaatttgggttggttttatatttttgtaattgcgtgtgtaagtatttttttttatataatgatttatttttttttgggtagatatttagtagtgggattgttggattaaatggtagttttatttttagttttttaaggaatttttatattgttttattagtttatatttttattagtggtgtagaagtgttttttttttattgtatttatgttaatatttattattttttgattttttgataatggttatttttgcgggagtaaggtggtattatatcgtggttcgataaagtaagtaaaaatataaagtgtggaaaggatattttatttaataaacggtgttgggataattggtaagttatatgtaggagaatgaaattggattttcgttttttatttatataaaaattaatttaagatggattaaggatttaaatttaagatttgaaattataaaaattttagaagataatattggaataattttttgagatattggtttaggtaaagattttatgattaaatatttaaaattaaatataataaaaataaagataaataggtgggatttaattaaattgaagagtttttgcgcggtaaaaagaatagttagtagagtaaatagataatttataaagtgggagaaaatttttataatttatatatttgataaataattaatatttagaatttataaggaatttaaataaattagtaagaagaaaaaataagtaattttattaaaaagtaggttaaggatataaataaataatttttaaaagaagatatataattggttaataaacgtatgaaaaatatgtttaatattattagtgattagggaaatgtaaataaattagtattttttaaagaaagaaatagatttagtatttatgtagatagtgatttatatgaaaataatttataaatgttatatttgtttttttttgggtattttttatatattggttaataagtataattatttttatttaattttttttattattagggaaaatgtttttttttatttttttgaaattatatataaattatatttttaaaatatataaaggattgtaggttttggaggatgtagtttttttggggtgtagttttattagttgtatgttgagtaaatttaatgttggttgatatttgaattattggggtttttttgttttttttttagatttgttatgtagtattgtcgttaatgatgtttttttattttagttattgtttatttattttatagttattttaagtttgtttgaatagtgtatatttttatattttattgaatttttaataatgagggagtatgatgtgtttatttattaggtttaagaattgaaatttttttattgaagttattaggagttagaaattaaatttaagtaatagaaaattttttgaatttgtttttttatttaaaatgatgtttaaattttgtatatttttttaattttttgaaggatagtaaatgaagttttagttgagagtgtaaaagttaatttatatttttatttattttatttattagtttgaataggttatttttataagaatcgagttgtttgattagaaaaaataaaagtgttgaatggaattacgtgtttttgaagggaggtgttttagattgggttttttagaagtagaggttgaaatggggtttttcggatatgaggtaatattggggcggagagaaaagtttttagtagaagagggaagagaggaagtaggagaaggtagagataagatttgtgtggggatgggtttttagttagagttttgtataagtttgattttatgcgatgtttttgggtatgaattgtattatagagttgattttagtagggggttgattttttatattttttgagtagagagttaatcgttatggtttgcgtatattaagggaggaggatgtatgattttgtaagtaagatggtgtttatcggttaaaggttatttttttaaaaggaagtagttgtaagttattagtagttgatataggagtcgggggatggtggggtaagaggtaagaggttaataattgtatcgattggagaaggaattggtgtatattattttttttaaaatattttagaaaattttttaaaatgatatatttttttaagatgatggtgtaaagagaattaaaatgttataattatttattttattaattagttttggttatgggggtaatttaatgttaatttaaagtttgaaagagttatggttatttttgattaatgtaaagaggaaaaattaggttatatttaataaacgttatatgttgatagataatttgtttttaaaatatggaggttagggtaagttaaatggaaaagttgaaaggtagttgattttagaattttaaggttttgtgagtttagatgatgtttagaaattatgttattttatattttatataaggtattgtaaagagatatttttagttatttttatttttattttataaataaaaatgttttttgataatatggatatgttttattaattgttgttttaaattttttttttttttaaaatggtatgagagttaggtttttggatagtaatattaagtaatttattggaatttttttatttttgatttaatataagtagtattttttaatatttttataagtttttttattttaattttaatattttatatttatttattgaaatatatttggtaggtgagaatatgaaaggtggtgaatttattttgaataaatatgataatttttaaatttatgattatatttttaaaagtgggaatatttgtattaataatattatttttttaatttaggtgtttaaatatatatatgtggataaataatattatatatagatatatatatatatatagatatatatatatagatatatatatatagatatatatatatatagatatatatatatagatatatatatatagatatatatatatatagatatatatatatagatatatatatagatatatatatatatagatatatatatatagatatatatatatatagatatatatatatagatatatatatatatagatatatatatatagatatatatatatatagatatatatatttgatatattgtataaagaaataaataagttagtaagtgtattttttattgttttttaaatgttttattatagttataataaggtagagttttaaattatgtttaaagagaaatattatattaaaaatataaaaaattgtaatgaatagtataaggttttttttgggttaaatttagaacgtgttagaaacgtagttagagagttaataatttagattaggaaatattaagattaaattgtatcgagtcgtggtttttttagcggttttttaaatgtttggttattttgtaatataattgaaaatttagtatagagtaaagggatatatcgtaggttgggtatgagtattataaaatttatttttttgaaatttgtgagtttggggttgatttgtagttgttggggttttgatgcgttaattgtttgtttattttgttttggaggagaggttggttttttaagtggaatgattttattattagttttatttttttttttgttaaaataaatagtttttaattattgttaggaagagtttttgatttttaattagttattaaagggagtttatcggtggtattttatagggcgaataacgttttattaaggaagaattttttaatattagtataattttggaattttagggttaagttgttagtaatttgttattagttttttagtaggattttatttattttttttttgggtattttgaaatttggtaaagatatagatatatatatatatatatttcgttttatttgtttacggattattatttttttttaaattttattgttttgagtttttattgagaaaatataggtagataaagagtaggttttaggtttgttaatgttgagattgttaatggtaggttttaagtttgtttatgtttagggaattgattatgtttagagtttaagatttagttatatttgtgttattatgggtagatttagaggaggttagaggagtaggagtgtttaagatgaagtatagggtatgaagttatttttaaatgtattaagagttatttataaagagatagggtttattttaggtattatttttttttttttttttttttttaattttttagagaagttgagaatataagaggagagatgtttttttttaagtgagtatatgttagtatcgtattttttaatattataggtgattttatgaggaatcgttattttaaagtaggtttaaatttttttagatggttgaatttttgatatataaataaagtaaattaggttagttttatagacgtatgaatagtgtagtttattatatgtttataagaggatttaggtttggggtatgttttgtaatggttatgttgaaattttttgagtttgagttttgtatgtaagagttaatagtatattgtagtatttattggagagtggatatgttagtttagaattaattttgatttttatcgtatttttatttttttaggataggtttttatcgtttatttttttattatttggtattttaggttttattggttttttgttttttattttttattatatgatttttgtttattatggtttttgtagggatcgggtatgggtgtagggaagattagggttggttatatgtatgttatatagtgttttatggtatggttgtgtttgtttttattttatgttagtagtatgatggtgtgtttggtgggtggttagtacgattttgagatattggaatggtatatttattgaggaggatgtaataaatttgggagttgtttatttgttgggggtaggagtagttggtttatgaaggggaggtatttggtttaatttttagaggatttgtgttaggtaagagtataattttcgggtgtagtagtaggtaaaagaggggatttggttagtattatgtttgagtatatgtgtttgagtttaaggttttaggtgtttgtgagatatgagtgttttttgggtatattttaaagttttgggggagttttttttttttttttttattattttcgagtttggtttgttggattttttggttattttagggttttttttaggaattaagtgttttgatatttatatgtaaagttggtattgtataatataaagaagaagagttagcgttatgttaaaattaaattttaaaattttttttattgagaataatatggataggaaatttaaaatattatgataagttaatagaagtaagtggtagaagaaaggaaaacgttttatattttattttttttaataaatatttttttttttgttaagaggttttacgtttttattttgtattagggtttgaaaattaggtagttagttttgaagtaaattatttagttaattaataaaattttaaaaatagaaataaaattaaaagttagaagttatttttattattaattcggttaaatcgttaatgaattgtgtgatgagttaattttttaagatttttgagtttttttttaatttagtagttgttttttaggagtgttgtggggattaaaagagtagtatttgtaaaatatttagaagagtggttgttttttagtaatttttcgggtagtgttagttgttgtattattattatttgtattattttaatatgttttgtattttgattgtattttgtagggtaggtgttttttttttttattgggtatatgaagggttaatatttaggaaggtgatgtgatgtatttaagttatttattcgcgacgttatagagtttgggtgtagagtaggtttgtatagttttaaagtttatttttttgttttatattttatagatttatagtttttttttattttgttaatcgtatatatgtattttatttgtgagtttgaaatagttttatgttaaatgatttggataaagtattttggagttagatattaatattttaggaggtgttaatatgtattgttttttttcgtgaatgaagggtagtatttagtagtgaaatgatggggtttttattttatttttttttttttttttttaggttagagtagtgttggattatttaggtatttttggtttgtatttttatttttatgttttagtattgagttttttgtgtttttgggcgtggttgatagttattttgtgtaggtggggtagaaatagtttgtagatttggaggtgttaggtgtgtatatttatttattgtttttttgttttgttgttgaagggttgggtagtggaggatagtggggataattggggtatagattatgagacgatagttttttttgtaggtcgacgatagtaggttattgttttagggaatttgtgttattgtttatattatgagtgtataggttgcgtttttttgaggtaaggtttgatagtttttataattgagagtttatatatttggcgggtatttaggttggaggttaggtaagttttttttatttttaaatatggtttgaaatcgtgtaagagaagatggaaataggtatttgttttagagatagttttatgggtgggtttatttgtaggagttgggggcgggggtgattttgtaggaaagtaatttttttaagatttttcgtagtttagttatgagttgtttgtagattgattgttttatttttttttttttttttttttttttttttttttttttgagatagttttgttttgttatttaggttggagtgtagtggtgtgatttcggtttattgtaatcgttgtttttcgggtttaaggattttttttttttagttttttgagtagttgggattatagtatgtattattatattaggttaatttttgtattttttgtagagacgggattttaagttggttaggttggttttaaatttttgattttaaatgatttgttcgttttggttttttaaagtgtagggattagaggtatgagttattgcgttcggtttattttttttttaattattaaaaaaaaaaaaaaaaaaaaaaaaaaaggaaggtaagcggtggggaatagggaagtttggggttttataaggagaatgtgttgttggttttttagattttaaaaatatttaatttttgtaatttagataaattagataggtattattaggttagggttaaggtttttagaatggttttgtaattgattataaatatagtatttattaagttttaattgagtaatttgtagtttattttatttttagttaattaaaatgtaattaggattgtttagtaatgtgtattttgttagtagttttttttttaaagagaaattatgttaaggagattataagaaaagttttttacgggaattggttttatttaagttggtgttttagttattgaaattgtaaaataaataaattatagtattgataatttaagaaaaagaaaaaaaaaaggtattttttttttttgggaataggttgtttcgttttgttttgttttttgttgttttaaataatagtgtggtattttaggagagtgatttttagggtaggattcggagggttggaaattaggtgtttggggatcggtttttttttggttttgtttaggatgtttgggtaattttattataggaggtgagtattgggttttttattttttgaagacgtagaaggattatagagcgtgtttatttttttgatatttacgagacgttgtttttacgatttagaataaatttaattgtatattcgcgaacgcgttagttttattagtcggtttaagattattttcgagggtaaggggaattatttttatattttatttttattaatatggttttttttggtagtttaatttttagggtttttagggggatttttttttttattttttgatttagttttggtaggaggggcgtttagtttaagagttaagggtttggtttttagttttcgtttagttaggggaatttttttttttagtttttatttttttttttggtttttttagagtttttttgaagcgagaaattgggaatttggaataggtgggtatttagggatagaggcgagaagaagaaggagagaaggatgagagaagagaaaaataagcggaggattttagagttcgtacgttcgatagggttggtataggtagtagttgtattcgttcgcgttgagttcggaatttgttttcgtgcgtttattcgtattcggagtttcgcgtaagtttcgcgggggttcgcgttatagggtagagtttcggtaattcgttggagttaagcgcgcggttttcggagttttttatataagcgcgcgcgtatatatatatattttttatttttaggttgaaagaatttacgttcggggtttgggggacggttttttcgggattcgttgaggagtattcgaatacggtttcgttaaattttttgttttcggtattttttttttgacgttttacgttagtttagggtaagattttgaatttttggggtttcgaattgaggcgcgtatagttattcgtatttttaatacgcgtatatacgtattttggaatacgatttggtataagtattttggttggggttttaagggtgggtagcgagttttgagtttttagagagtgaaaattattttttaaaagagataaagtgtcggttcgcgggtatttgcggggttggggttcgaggtgaggtttttaggcgtagtcggacgcgttttttagatttttttttagtgtttcggagcgtttgggattttgcgggagtcgtcgttcgttcggagtttcgcgtattttaattttcgggaaatcgttatatttatatatttatttttagtatttacgattttttttttttagggaaatcgtttttggttttttgttgggaaggagggagttggggtaagatgtttcgggtttttttttttttttaggagtcgggaagaggttggaaaggagagttttagtatttcgattgtaagatttacgtttaggggaagttaggattagtcggcggcgttggtcgagaattttgcgagtttaggttgggaggcgcgcgtttcggtgcgtttacgtcgcggtcgtagttttagaaagaattcgggcgggggttttttcgtatttggaagtgttggaagaaggcggagatgcgagtgatttgtaggtttaggtatttggaggcgtagcgagcgcgttggacgttttcggtagatagcgattcgtttagtcgtcgcgtagtagtcgcgtcggggtcggtcgttaggtagtcgttggaggtcgttagttagaggtagagggttaggatcgcgtcgggtatttcgggtattatggttgcgggtcgagggcgagggcgagggcgtcgggcgcgggtcgaggttttttgtttcgcgtcggggttgtattgttgaggattaggtagacgtcgcgattgagtcggaaagtttaattttttaatttcggtcggatttttttcgtcgattttttttttagttcgttttcgaggggtggggtgagggggataggaggtcgtattattggttggaaggcgtgtgagtgataggggggtcgggcgtagggtttatgggtcggtttcgttagttgcgagttcgggcgtttcgggggagggcgacgtcgagcggttttttacgtcgcgtaggtttcgaggggtttagtttttacgtaggcgtttttttcgttcgtattaatcgttttttgttttttttatttttttttttcgtttaggtaaacgtcggtgtgagtaggtttaggtttgttaggaggggtgttttttttagtaggagggaagaggttttaggatttttaggggcgttttatttgtttggggattgatttcgcgtttttaagtggtttgtttttttttcgattttttttgggtttaggttttttttacgtttttatatattcgaattttttttgtttaggtagtggaaagaagtgaagaaaataaatggtagtaagatagacggggaggggagcgtggatatttgttttatagtgtttcggagataaattttttttttttttttttttgtatttttttcgtttttttcgtatttttttttttttttttttcgtattgttttttttggagatagttttagtgtatagttaattatttttaggtttatacgttttgtttttttaggtgtttgtttttttagtaagttttgtacgttttaaagtgagtgatttattttaaatagatttgcgttttaatttttttttttttttacgatttgttcgagttttttgatttaggttttttagttttggaatggttgtttcgtttttttttgtcgtttttgtttagtgtttttttagtatataaattttttttttttagttaggattttgttatagaaagataggaggtattgataagatataatttgtaataaagttttatatttttttgagttttattaggaagtgatagtttttttgtaggtaggagagtttagagaaaaaagatttaggtatatttttattcgaatggataataattgattgttgtttttttgttttgatatttttatttttttttatttaattgtatttttattttcgaaaacgggatttttataagtatttagttaagtatagttagggtatttagatgtattcgttttatttaaagttatattagaaggttggaattttttttgtataaagtttatatagttgttttgtaattttttatttttttttttatttttatatataggttttattttgtaattttgagatttgtttgttaataaattgtaatgatagttatttgtagttattttattatgagtgttttttaaatatattattttatatgtgtatttttttatatagtttaaattagaaaggttagttaaattaattggttttggtgtgttttttagcgaattagaaaattagggttattttgtttaaaaggttttataggtaaagttagttttatggatatgtaagttgtataatggtatagtcgtatttttagaaggtttgttttgttattattattttgaaattttttataatgatagtggtttgttaggaattgggtcgcggtaggttagggaatattattgtttgagttgtgttttaggtgagaaattagtggtagtattagattttgataggagttttagttttatagtgaattatgtatgcgagatgtttaggtagcgtattttttatgagaatttaatgtcgatttgagatggagtagttttatttttaagttattatttgttatttttaggtttatggaaaaattgttttttatgaaattagtttttggtgttaaaaaggttggggttattttttatttgggttggaaatttagtaattttggtataagtttatacgattttaatgatttgttttaaaattgtttagaattgtaaatggaaatattttttaagtatgttaaatataatattaacgaagagtaaagaagttaattataatgattttaagtaggtatgtgtataaagttaagtgttaataaataatgatgtttgaatatcgagattgttttttaaatgttgttatttttatttgtgaattattaaaaatatttttaaaagttgtaggggatttttttttagtgtttgtttggagttgttttgttttgttttgagacggagttttattgttatttagattggagtgtagtggtgtaatttcggtttattgtaattttcgtttttcgggtttacgttatttttttgttttagtttttcgagttgttgggattataggcgttcgttattacgtttaattaattttttgtatttttagtggagacggggttttatcgtgttagttaggatggtttcgattttttgatttcgtgatttgtttgttttagttttttaaagtgttgggattataggcgtgggttatcgtgtttggtttgtttggaattttaaagttaagtaaatatgtggttttggtgaaggtaaagatattatgtatatcgatatttttttaggtaattttgatttataattttgtatgttatattatgaaatgtatattttagaaagtgaaattataaggataagtatgttgagtttttaaaaatagtttttggatgtttataggggttgtcgtttttttttttttttaaaaagtagtgtgtgtgttatttatatgggttttatagtatatttatttttatgaataaatgcgttttgtaataaattataaaggagaatagttagtttaatagaaaatttggttttaaatatatagagttattttattataaatatgttaaaataatatttgtagttatattgttttttttttttagaataattatagatattttttgtgattacgtaggttttttttatattatttattttaattgtagtttaaagtaatttttaaaaggaaagtattttagtaaagttagaataatagttaaatttcggtgtttttttgttttgttttgtttttattttgtttatgtatgtttaatttattatgtagtttattttgtaaattgaaatatggaagttttttgatttttgatattattaggtaagttataatttaagtttatgaaagttaattataggggaggagaattttaagagtatgttgaggaaatgatggataaaggggtaggattttcgggtgtagttagtaagacggtatttagtatgtttttttttaaatttttttgatttttatgattcgaatttgtttagagaagaatttaattttatattgattttggtttgatttaaatagataaatatatatttaataaagagagtagaaaagtattttaattattttttatttatatttatatgaataaagatagattaaaatgtgtggttgttttggttaggttttggagaaattatataaaataaagtttttttttatagtttttaaaaattattattttttttgtattttaattattggtttttttttttttttttttttttttttttgtttttttgtagagaatgagaaatatttgaaatttttattaaatatagattttagggttttaaattgagagattttgagttagtatattcggggtggagggttgaaatgttagtttttaaataatattttaagtgattttatataaatttaattagggattatattttgagggataattgattttaaaagtatatttgaagttcgattcggtggtttatgtttatgattttagtattttgggaggttaaggtaggaggattatttgagtttaggagtttgagattagttcgggtaatacggtgaaattttatttttataaaaagtataaaaattagttaggaatggtggtaggtggtaaatatttgtggttttagttatttaggaaatttaggtgggaggattgtttgagtttaggaggtcgaggttgtagtgtatttagattatgtcgttgagttttagttttagtgatagggttagattttgttttaaaataaaaaataaaataaataaataaaaaaaagtatataattattaaaaatggtataaaaaattttatttaaatagtatttatgatttattgttgtttaaagtatttttttttagatgtgtgtttatatggattggatatattagtttattttttaataattaaatggatatatttttttagtatatttagttaagatttttttagatttattgttttttttagaaagtaatttgtttttttaaagggtttttagttatattggataaggataaagtttgaaggtagtaaatataatttttatttgatatgttttttttggaaaagtaaaatgagaatttatttaaaatttggagaataaatatttaaatatgatagtatttaggagttatgaataaaacgatatcgtttttggttttggtttttaggggaaagtaaagtgaggggaagaaagttatagatgaggtttagttttttttttagttgtttttatttgatgatgtaagagtgtgtatttttttttagaaattgtagtttattttaggaaaagtaatagtggtaagatgaaggagtgtgttttgtaagtttattggttatgatttatatttttatttttttaggtaatgtttttaggttttgttagtttagtttcgttaaagtttttttttaatcgtttttttttttttttagatttaattttttttttgtatagtataggatataattaataattgaatggataaatgttagatttttatttttcgtaatatggttttaggtaggaatgaggtgtatttttatggtattgtatttatttgttttcgatggttaatttaatgattttataaataataatgattgtttttggtatagggtttttgaatatatattttagtttatataaaagattatcgtatttatttatagttttttgtttttttttattattttgtaaggttagatattttatttggggataattttagtatataatatat

SEQ ID NO: 2149 - DNA, 5368 bp, Artificial Sequence
  chemically treated genomic DNA (Homo sapiens)
gttttttaggttggagtgtagtggtatgattttagtttattgttatttttattttttgagtttaagtgatttttttgttttagttgggattataggtgtgcgttattatgtttggttattttttatatttttcgatagagatagggttttgttatgttggttaggttggttttaaatttttaattttaagttatttgttcgtttttgttttttaaagtgttgggattataggagtgagttatcgtgttcggtgattaaaagttttatatggtgaagaaatgataagggaagttagggatagattataggagtttatagtagttttttatttatgatttttattatttatttttttatatgtgttgttaatatatagatatatagatatatatatatttattttttttttttttttttggtttataggattttataatagttttttatttattatttatttttttatatgtgttgttaatatatagatagatatatatatatatatatattttgtttttttttttttttttttttttttttttgtttgggatagattataggattttataatagttttttatttattatttatttttttatatgtgttgttaatatatagatatagatatatatatatatttttttttttttatttttttttttttttttttttttttaggtttagttttgagtaaaggatataggtattttttttattaatttgtatagattaggtttttcggtagggaggggtgtggttgttttcgtttttatatttttttgttattatttttgattttgtttttttttgtcgtttttttttttgtttttaattttcggtggttttagtttttgggtgagtattaatagtttcgtttttagcgtggtttgtgtttttttttttgtttttttttttttttgtattttttttttatttattaaagtttatgtttttcgttatggttcggtgtatttttttgtgggtgtttttttgtttttatatttcgtttatttaggtggaattttttaagttaattaaaggtaggtaggatagttaatgttagtgttgattattttagtacgtgtatgtagggagggtcggggagtttcggggatgtttggaaatcgttattttgaggtgggtaggtttggtagagggaggaagtagttaggagtatttgggttttggaagaaaggggggtgttttttatggatgttttgagttgttaggtgtagcgtaggggtttttgtttttttgtttggatttttgatatttttaggtttttgtttttttttttgggttttttttttttttattttttgggtttttgaaatattgaatttttttttttttttttatttttttatttttgagtttttattttttttttttgtgtttttttgtattttttttggggtttttgtttttgggttttttttttattttatttatttaggtgtttgtaggtttttgattgattaggttttgggtgggcgggttttgttatttggggtaataattataataagttagtttttgtttggttacggagtgggggtggaattatggttagtggtattttggtttcgggttgtcgtatttttgtaatcgaggtatttggatttaggtttaattgttattttattagtagttattttttttatcgtattattttatttatattttttatttcgtttacggtgtaggtgagcggattttacgttgtagttttgtcgggtttggagatttagaaagataggggttaaataaagcggattgggagtttggatttttttttgaaggaggagggttttggagttttgggtttgagagaggaggtattagggaagttgaatgttagggattgtagaggaaagggttgggggtcgattggaagaggttagagtttggggtggggggtgatagggatttttgagtttttttagttgatgtgcggcgttttttttttagtttacggtcgcggattttttattttaagttgtaaagtaggatttttataattgggttttcgacgaggtttttagtagatgggagataatttttggttcggtttacgtgtttaagatttatggcgggttttgcgtttagtttagagttttagagtttgtagattttacgcggattgtggggattaaggatttaggagaaaaggtaaagtttggggagtgtcggagttcgtaggggatagggcgggggattgtatttgagttttttgtttttttacgtgagtttttgggtcgttttttcgtagtttagatatcgcggttggcgttttttattgattataaagtattagagtagcgagacgagggcgtagtatattggtttttttagcggggattcgcgcgtttcggaatatttcgggttttagtttttataattcgtagattattatcgcgggggttttttttaggtgtttgggtggaagtcggcgtcggcgagacggggcggagtttcgggagtttggggcggggttagaaggaattacggttttggggcgtggttaaagggtttggggcgggatcgcgaggttagaggagtcgggggaggggttgggtattaggttaggttagaaggattagggattataaatttatttttagggtttttaagttgttgcggagttagacggcgggttgtgggtggggaggagattagaatattttgagacggggttaggtgggagttgggagaggtaatttggagttgttgtttaagatgtagtttagttttagtggttatattaagacggtttaagatagagcggaattagggaggttgtttttggtggttgggggtttgggtttgagttttttgaatagtagaaggtgtttggatttagggaggtgaggttgggaagggttcgggtatgagaaaggaagttgaagttttttggcgtgggtggtaggaagggttttaattttggggcggggtgtgagggtcgtggtcgttatggttgtcgaggtcgaaggagagggattttgaattcgggatttagggtttgggatggggtatgaaatttatgttttgggtatgtttttttttttaattttgtttaggttttaattgtttggacgaagaatttcgagttgtttggtcggttttttatagtattcgatcggggcgttttggatcgtcgttagttttatttgattatttcggcgcgggattttcggttttattttaagtaagtcgggttttcgttcggtatcgttttttgtatagttttcgtcgtggtcggtgtacgtcgagtttttgggttggtttttattttttgagtcggtggttttagtttcgatttttgtagtagtaagaattaaagtttaggttttagttttttttttttttttttaagtatttaggagtttttagtgttattttttaggaatcgcggtagggataggaagtttgtatagcggttcgaggggatttcggatttgagggtagggtttttttcggtatttgagtttttagatatttttttttaaggaagcgaaagtttttttttatttttttaggatgcgaaagtttagtttttaggacgttaagtatttcgaggatttaggaacgtaggtaacgcgtgtcgggtcgcgttttttttaaggggtgttcgtttggaaatgtaggagtttgaatgtgtagattttttagatttcgaggtttgaaattcgtttttaaggatttagttgtatttttattatttcgttttgtttttataggacggagttgttcggatattttcgtaaggattttttgatttattggagtttcgaagagacgttttaggtttggagttacggttcgtagcggtcgttttgttcgcgtttttttcggtcgtttcgattatcgcgggttcgcgtgtcgcgcgttagttcggtgatttcggttatgtcgtatcggggagttttgtttttggtttaggagttttatagttttttgttgtattcgtttcggcggttcgatcgtttttgttcgttggaggcgttttggggcggttcgtattggaagtttttgcggggtatttatagcgtgtcgaaagtttatagtatcgagaattttagttatggtagtttgaagtcggcgttggtgtgagtcgttagggttagttttattttagattcgtttttagggtcgcgttgtcgagcggagttcgggattttcgtttattaggaagggtttcggatttagtttgagtcgtatttattacgtttattggtaacgtgggggcgggattagtttagatatttatttagttgcggtattacggagaggggattaagtttagataatgtttttgtaggttgtggtttcgggggtaagatacgtattttgcgggcgtattaaataatgagttaaattatttgaattatatttattttcggggacgtttcgggtattttggtttgagggtagggtgggcggaggtttttaagggagaggtggggttcgggtttaatttttttttgggggtatttgggttaagtggtttttttggtagtatagttacggggagatttttttttattgggtagaagttaagttcgaagtagcgttttttttgttaggttggattgtggtgtaggaaagttttaagtggagggttgaggttttagtttagtatttttttcgggttatggtttttttttggtttttaagattttataattggtagaggtaggtttttttatattttattttttgtgtttttaggttcgattagtttttagtattcgataattgggtttttgaggttattttatcgtggtttttgttttatttttggcgttagattattgaggggagagggttggggcgttttgttgagttatttttgcgtttttttggttatgtgtatttttcgttttcggggggattagtgtttaggttattttagtattttattattttttggtggttttgtcgtttttataatttcgaggtatatagttagatatacgaggtaggggatgtattaaggatggagatgttttaggtaagattatagggtttttgggtattttttatttttttttaggttattattggtatgagaaggggtagattcgtgtgagttgtggaaggaggtttttttttggaggggtatgatttttagtaagttttaggtggggtagtttttgagggtggggatttgaaatgttggggtattttaggttttttgggttgtggggtgggttttgaaaggtaggtgttcgggtggtgggttttgaataggagatgtcgggaagggtttttgggtttttgtgggtggtgtattacgcgggatgggaaggttaggattcggggttgcggttttagatttgggtgaagtagtgtttttgttttagg

SEQ ID NO: 2150 - DNA, 5368 bp, Artificial Sequence
  chemically treated genomic DNA (Homo sapiens)
tttgggataaggatattgttttatttaggtttgagatcgtagtttcgagttttggtttttttatttcgcgtggtatattatttataaagatttagagatttttttcggtattttttatttaggatttattattcggatatttgttttttagagtttattttatagtttagaggatttgagatgttttaatattttagatttttatttttaggaattgttttatttgaagtttattgggggttatgtttttttagaaagaggtttttttttatagtttatacgggtttgtttttttttatgttagtgatggtttggaaggaggtggaaggtgtttaggggttttgtagttttatttggagtatttttatttttggtgtattttttgtttcgtgtatttggttatatatttcggggttgtgggggcggtaaggttattaggaggtgataggatgttggggtaatttggatattaattttttcgggggcgagaggtgtatatggttagggaggcgtaggagtggtttagtagagcgttttagttttttttttttagtggtttagcgttagaggtgaggtagagattacggtgaagtgattttagagatttagttgtcgagtgttagggattagtcgagtttggaggtatagggagtagggtgtaggaaggtttgtttttgttaattgtggggttttgggagttaggaggaggttatgattcgagaaaggtgttggattgaagttttaattttttatttgaggtttttttgtattatagtttaatttaataggaggggcgttgtttcggatttagtttttgtttagtgagagagggttttttcgtgattgtgttgttagggaagttatttgatttagatgtttttaaggagggattaagttcgagttttattttttttttagggattttcgtttattttatttttaagttaggatgttcggagcgttttcggaagtgggtgtggtttaggtgatttaatttattatttaatacgttcgtagggtgcgtgttttgttttcggggttatagtttgtaaggatattatttggatttagtttttttttcgtgatgtcgtagttgagtgggtgtttgggttagtttcgtttttacgttgttaatagacgtaatgagtgcgatttaggttgggttcggaattttttttagtgagcggaggtttcgagtttcgttcggtagcgcggttttgggggcgggtttggggtggggttggttttgacggtttatattagcgtcggttttaagttgttatagttggagttttcggtattgtaggttttcggtacgttgtagatgtttcgtaggggtttttagtgcgggtcgttttagggcgtttttagcgggtagaagcggtcgagtcgtcggagcgggtgtagtagggggttgtaggatttttgagttagagatagggtttttcggtgcggtatggtcgaggttatcgggttgacgcgcggtacgcggattcgcggtggtcggggcggtcgggaggagcgcggatagggcggtcgttgcgggtcgtggttttagatttggggcgttttttcgaagttttagtaggttagggagtttttgcgggggtattcggatagtttcgttttgtgggagtagggcgggatggtgaggatatagttggatttttggggacgagttttagatttcgggatttaaggagtttgtatatttaaatttttgtatttttaggcgagtattttttaggaaggacgcgattcggtacgcgttgtttgcgtttttgggttttcgaggtatttaacgttttggaaattgagttttcgtattttagggaagtaaaaggggattttcgtttttttgggaaggagtatttgggggtttaagtatcgaaggaggttttgtttttagattcggaattttttcgagtcgttgtgtaggttttttgtttttatcgcggtttttgagaggtgatattaaggatttttgggtgtttaaaaaaaaaagggaggggttgaggtttgaattttggtttttgttgttatagaagtcgaggttgagattatcggtttagggaatgggagttagtttaggggttcggcgtgtatcggttacggcgggggttgtgtaggaggcggtgtcgagcgagagttcggtttatttgggatagaatcgaaagtttcgcgtcgaggtggttagatagagttggcggcggtttaggacgtttcggtcggatattgtgaaaggtcggttagatagttcggggtttttcgtttaggtaattagagtttgagtaagattgggggaggaggtatatttaagatatagattttatattttattttaagttttgggtttcgagtttagaatttttttttttcggtttcgatagttatgacggttacggtttttatatttcgttttagggttagagttttttttgttatttacgttagggaattttagtttttttttttatattcgaattttttttagttttatttttttaaatttaagtattttttgttgtttaaggaatttaaatttaagtttttagttattaaaaataatttttttggtttcgttttgttttaaatcgttttggtgtggttattggagttgagttgtattttgggtagtaattttaagttattttttttaatttttatttgatttcgttttagaatattttagttttttttttatttatagttcgtcgtttagtttcgtagtagtttaggagttttgaaggtgagtttgtagtttttggtttttttggtttggtttaatgtttagtttttttttcggtttttttaatttcgcgatttcgttttagattttttagttacgttttaaagtcgtgattttttttggtttcgttttaggttttcggagtttcgtttcgtttcgtcggcgtcggtttttatttagatatttgggaaggattttcgcggtggtggtttgcgagttgtgggggttggggttcgaagtatttcggggcgcgcgggttttcgttgggagagttagtgtattgcgttttcgtttcgttgttttggtattttgtggttagtgggaggcgttagtcgcggtgtttgagttgcggaaaggcgatttagagatttacgtgaaggagtaggggatttaaatgtagtttttcgttttgttttttgcggatttcggtattttttaaattttatttttttttttaaatttttgatttttatagttcgcgtggggtttgtaggttttggggttttgggttgggcgtagggttcgttatgggttttgggtacgtaggtcgagttagaggttgttttttatttgttgaggatttcgtcgaaagtttagttgtgagaattttgttttgtaatttggggtagagggttcgcgatcgtggattggagagaaggcgtcgtatattagttagaaagatttaggagtttttattattttttattttaaattttgattttttttagtcggtttttagtttttttttttgtagtttttggtatttagtttttttggtgtttttttttttagatttagaattttaggattttttttttttagagaggagtttaagtttttaattcgttttatttagtttttatttttttgggtttttaggttcggtagggttgtagcgtagggttcgtttatttgtatcgtgggcggggtgaagggtatgggtgggataatgcggtgggaaaagtagttgttggtgagatggtagttgggtttggatttaggtatttcggttgtagagatacgatagttcggagttagggtgttattggttatggttttatttttatttcgtagttaagtaggagttggtttattgtggttgttgttttaggtgatagaattcgtttatttagaatttagttaattaagggtttgtaggtatttggatggatggaatgagaaagagatttagagatagggattttaagaggggtataaagaaatataaggagggggaatggagatttaaagataggagggtggaaagggaaggagaagtttagtattttagagatttagggggtgggggagagagaaatttaaaaagagggatagggatttggaggtgttagagatttagatagagagatagagatttttgcgttgtatttagtaatttaggatatttatgagaaatattttttttttttttagggtttagatgtttttggttgttttttttttttattaggtttgtttattttagggtaacgatttttagatattttcggggtttttcgattttttttgtatgtacgtgttgaagtaattagtattagtattggttgttttgtttgtttttgattggtttgaaaagttttatttgggtaggcggggtgtggaaatagggaggtatttatagagaagtgtatcggattatagcgaaaaatatgggttttgatgagtgagaaagaaatataagagaggagagagatagggaggaagatatagattacgttggaaacggagttattagtatttatttagaggttagagttatcggaagttagagatagagagaaaggcggtaaaaaagagtaaaattagagatggtaataaggagatgtagaaacggaggtagttatatttttttttgtcgaggggtttggtttgtatagattggtggagggggtgtttatgttttttgtttaaagttggatttgagagagagagagggggagagaaagtgagagagagagagtgtgtgtgtgtgtttgtgtttgtgtgttggtaatatatgtggggagatgggtaataggtaaagggttattgtgaagttttgtggtttgttttagatagagagaaagagagagagagagagagagatagagtgtgtgtgtgtgtgtgtgtttgtttgtgtgttggtaatatatgtggggagatgggtaataggtgaagggttattgtgaagttttgtggattagagagagagagagagagtgagtgtgtgtgtgtttgtatgtttgtgtgttggtaatatatgtagggagatgggtaataggggttataggtgaagggttattgtgaatttttgtggtttgtttttggttttttttgttatttttttattatatagagtttttggttatcgggtacgatgatttatttttgtaattttagtattttgagaggtagaggcgggtagataatttgaggttaggagtttgaaattagtttggttaatatggtaaaattttgtttttatcgaaaaatataaaaagtagttaggtatggtggcgtatatttgtaattttaattaaggtaggagaattatttgaatttaggaggtgaaggtggtagtgagttgagattatgttattgtattttagtttaggggat

SEQ ID NO: 2151 - DNA, 13084 bp, Artificial Sequence
  chemically treated genomic DNA (Homo sapiens)
aggttggtaaaagagaagttgagtgaaaggagataaaggttggttggggattttataggatggagttcgtgttgcgtgttgaagagttttgtgtagtattgatgatgttaaggttgtagtgagttaacgtgtattttttttattagttaagggtttagagagagttgggagtaggtagattgtgagttatttgcgtaagagggttatgtgttttggattatgaagaaaggtagatttatagtttatttgtttttttttttttttttttttttttagatagaattttattttgttgtttaggttggattataggtatttgttattatgtttggttaatttttgtatttttagtagagatggggttttattatgttggttaggttgttttcgaatttttgattttaagcgatttatttatttttgttttttaaagtgttgggattataggcgtgagttatcgcgtttagtttgttgtttttttttgtttttttttgattttattagtttaattttttattttttttagtttttaattaggattttataatttttttaattttatttaaggtgagaggttatgaagtgttagttcggttgtcgggttattttatgaggatggtagggaggggattttgagaggagtggataggaggtgttttatgggtgtttatgttggtataggtttttgttgtaatttatagtgttatttttgttatttttattttttcggttttttataagtttgtttttattttttatttaggttttagtttaaatattatttttttggagaaatttttgttgattatatttgttgaattgatagttagttttttttttgtttttttttgatatgggatgaattgtgtttttttttttttgtaaaaatatttatgttagtattattcgagtttcggatacgttagaatgtgattgtttttggagatagggtttttaagggggtaattaagttaaaatgaggttttaatttaatacgaatgtgtttttttaataagaggagattaggatatagataggtatataagaaagattatgtgaagatatagagagacgtaaaagttaaggagagaggttttagaagaaatttatttttttaatatttgattttggatttttggtttttagaattgggagaaaataaatttttgttatttaagttatttagtttttggtgttttgttatggtagttttagtaagttggtatattttttatttttttttttggttttatatttttttaagaggtaggttaatgttgtagcgtggttaagagcgtagttttgggtgtggttgtaataagggtagtagtagtggtagtagttattttttgtttatagatagaagtgattggtgggaatgtgggtttggtgatggttagtgttgaagataggtttgggttaggtttgaaggataaataaggaaggttaggttgaggtggttagggttgaggttgggttggagaaggggttttgtatttgcggtggtatttgggatattttttttttttgatgttgttggtttgtttatttaaggtaggaggggttagtttttttttaagtaggttttggtttttattttgttttagggggttttagttgtaatttaggtggtaagattttgtaaattattattgggtatattattgttattaattttattttatttgttgattaggttttggtgagtttgtttatttagtaagttagaaggggtggattttgtaaaatagttgaggtatatattaggtttttattaaaggttttggatatgagtaagtatatatagataattgggattagaaatagtagatagttatagttatttcgttttgaaattggaaattattttgtttttaaggtataaatggttttttagaatatttagttttttttttagtttttaagtttgttagttatttagattttagttgttggtattagaaagattaagtgttttgaggtttgatttaattttttatttgttatttagatgtgttaatattatgtagatatagaattgttaaatttgtttgggttgtttagggtttaaatgtgaaaattggaaagtagtcgttttgtttttttttggttgtttttgtattttgttgtttatacgatttaatattaagatttttgtttatattttataggaattttagtttttgtgagatattttttttttatttggtttattgtagtgttaatttttgggaaatttttttttttttttttggtttgttttaggtttatttattttttatatttttataatttttttattttttttttttttttttttttttttggttttatttttttatttaaaaggtgattttaaaaaattggttttgttgtcgggcgtagtggtttacgtttgtaattttagtattttgggaggttgaggtgggtagattatttgaggtagggagtttgagattagtttgattaacgtggagaaattttatttttattaaaaattggttagggtggtggtgtatgtttgtaattttagttattggggaggttgaggtaggaggagaattatttgaatttgggagtggaggttgcggtgagtcgagtaaaatttcgttttaaaaaaataaaataaataaataaataatcggttttgtttttttttttaattattgttttttttttttttttttgtttatttttaaagattttttttttttgtttttatttttattttttatttttttttggttttaattgaagtttttacgtagttttttttttgattttttggatagttatttgtttttttaagttttttttttttttttttgtggagatgttttttttagaatttttgtttttattagcggtttataatttttgtattcgtagaaattagatagtttttttgtttgagggttaatatttgttttgtttttattttaaataatatagtgagttgtatatagaagttatttaatgatattttaattgattttattgggtttttttttacgtttattttagaaaagggatgtgattttggattgggtaataaagagtcgtttattgtatgtgtataaattataaatttttaggtatattttgattatagtaggatttttttgttagttttatggggtatgaagttggtattaaagtatttatggggatgtataagtaaggaagggaagttaaaagtatgtttgattatataattaggtgtaagtaagttttttaagtagttagggtatgaattttgtttatttttgaaatgattagaagaaaaggtaagagtgtgatttattttttgtttttatagtaatttatttggttatttattttttttattattaatggttaattttttaagggtattatttttggttatgaggttttatgatttaaagttttaagatttatagtattttttttggagattaagggtatttttttgggtgatatttttttattatttagaggttagttatttattatgggtgatttatttaaataaattggttgttaggttatttttttagataagagtttaaatttgtataaataatttttagttatattgtgatttttatgtgtaagtttagaggggacgatgttgtaggaatcgtgttaattattaagatatttttaagtttattttagagaatgttaagatagttttttaattttattaagtgagttttttataggaatatttttttaagttgaaaaattgtaggaaataatttatttttatgttattaattggttattataagggttataggaattatttaggaattagatgatatttggttttttttatagtttatataagttagtttttgtaaagattttttttttattttttttaatttttttttttttttttagagatttttgttttaatttgtaaggattttttggtttggtgtttttttaggtaaagtgtaagagttaggatttttggattttgtttttagatatgagtgagtttggataagtaaattatttttttttttagtttgtttgggtttttgtaataaaatattataaattgggtagtttataggtaatatatatttattttttatagttttgaaggtcgggaaatttaagatttaggttagtagatttgatgtttggtgagggtttgttttttggtttatagagggagttttttggttgtgtttttataaggtggaagtggtaaggggttttttttcggttttttttattagggtattaattttatttataaggattttgtttttatgatttaattattttttaaggtttttattttttaatatattatcgtgagggttaggattttaatatatgaattttggcgggatataaatatttagattatagtattttgatagtaaaaatgagataataatatttattttttttttttaataaaaagataaggtgaagttaaaaggagggtatatatatatataatgtgaattttttgtgtaaaatgtgttaaagagttgtttgattaattgttttataagggaattgttttgagattaggtttattgatttagaataagtagttaatttgtagttagttttttagggaatagatattgaaaagatttttggttttgtattttataaataaagtaatttattaattgaattttttttagcgaattttttatttaggtgattttggagagggcgggggatagacgcggtcgtagtttaggtttcgggagcgttacggaatttaacggtggtagcggaggtcgcgttttttagtgttcgcgtttttttcgtcgggagttttttggtcgtttttgcggcggcggttcggggtgtttggtcggcgcggggttcgtttagtttggttcggggagaggattggttgggtaggggcgtcgtttcgtttcgggagaggcgggtcgggcggggttgggagtatttgaggttcggagttatcgtttcgtcggcgttcgtagtattttttcgttagtagtcgttcggagttagttaacgagcggtgagttgcgcggggcgcgggggacgcggtttcggtcgggtaggggagagggcgttcgggcgttgtttggggcgcggttcggagagggttcggtttttcgggatcgggtcggggcgcgcgcggagagttttatagtttgtgttttgttttttaggagcggggcggcgggtagcgatttgggttcggggtagtcgtttttgattatcgagggcgttggcgttcggggaaggttggtagtattttacgagatttatatacgttttcggggcggtacgggttattttttgcggagtttcgtgggtttcgtcgtcgtcgtattttcgtcgtttgcgttttgcggttttagagtaagttttattcggtgacgagtcgtagtttggttattttagttttattaggtttcgttgcgaggggaggcggaggggttcgtttagtaaattagacggtcgttttagtttttttaattggggttggagtttcgttatttttttttagattacggtcgcgggggagcgaagggattttttaggattgtatagggcgtttttcgggatttatagtttggttggttcggttttttttgagtattagttgaggttggatttggaggagatttcgttgtggagcgcgaatgagtttttttatcgggattagttgcggtcgggttgtagtcgttgtttggttgttgattttatagaaaatggtgtttgttttatggtttgagtgggtatgattcggttttgtaaagattgtaaattttaagttttttcgaattaaatgtttttttttgtttagattgtttgtgtttaggaaatggtgggtgtggtaaaatgttggttttagcgtgtagagttttatcggggggtttttataatatgtttgagagtttattttgaattatcgggtgtttaaatagaaatattaaaacgattgttttttgagtagtaggcgtttaggtttagggagtcggggacgtatggtggaggttgggatttaggttttagttttattttttaagttcgttatgcgggttttagagattgcggaatgtttgtaaagtgattttgggaattgggttgttgcgtaatgaggatatttggattttagtgatttaggttgtttttaggattttggggaagaaatgggagaaggtttagttaattttgaagaaaatgagattgatataattaattatttgggtatagggtttgagaagaaaaagttttcgttagtttttaaagttttgatttgtttatttaaggttttttttttttttgagacgtagtttcgtttttgttgtttaggttggagtgtaacggtattatttcggtttatcgtaatttttgtttatcgggtttaagcgatttttttgttttagtttttcgagtagttgggattataggtatgcgttattatgttcggttaattttgtatttttcgtggtggtggtggtgggggggggggggtttttttatgttggttaggttggtttcgaattttcgattttaggtgattcgtttgtttcggttttttaaagtgttgggattataggcgtgggttattgcgtttggtttattttaagtttataaatattttatattaggaaattgtgtgtttttataaaaggtaaagttgaataatgattatttatttttttataataatagttttttttttagatattgatttttaatttttagggtagggttttttattttaaagatgattatattttatttttgatttttgggggatttaagtaattttttaaatttataatatttagaggtgatgtttaaaattagtatttagtttagattttggggagaagtttgatgatggtttttgaatatttagtatttagaagtgttaggaggatgttttattaagttacgtaagaagtagaagaggacgagtatcgtttgatggattgatttcgaaaattagttgtgtttaagtagaataggtgtttcgttttgttaagcggtttttaaattatgatagttcgttgtattataaatatgtataggtgttttataaagattttttatttagtgaggttaagaggttaatgttggttttatgtataatttaggtatttttttatatagaatttttattagttagattttaaattttaattgtagttaagatttttgtttatgtagtatgtttttagaatttcgtgttgattttaaatgttaagtggtttgtaaatttatgtatttgatatttgtggtaattgattttaaatatagttttttttttttgtgatcgtttgggatataggtttttatttaagggtagttttttgtgtttggtgtttgaattggatttttttattaaattttgagtgggtaatttaagaattagtttaggttgtgtttgttgtatatttttagttcgttattgattaagtgttatgtgtttttttttgaattgtttagttttttcgtaggggggaagattagttatgagaagtagaaagtaattttattttttttgatgttagggagttatgatgagaaagaaattttaggaaaggattagttttttttattttaatttagtattattgaatttgtttttggtaaatgggttttttttaagttttgttttgtgttttagtaaggataggaagtagattgttttttgtgttatttgaggagtagtgtagggtagtgtttaggggtttaggaagtagtttttttttgtgacggttgcgtataggttagggatttttatgagtagatattttagaagtgtttttgggaatttagataattggattgattgttgggtgggtttagaatagtatagtgtagcggatagttattttttgttaaagggaaaagttattaattaatagtcgattaaaatggtttgtattttaatttatgtttaaattttttattttgaagttatattgaattgtttattgtaggtgtttataaatgtggagatttagttagtatttttttatttttagtttattttttgaagtttttttttttttttttttgattgtttaaaattttttgattttggaaatattagggtggggtttatatatttatagtgtttgtagagtgggaagatttgtgatatttgattgtatgtttttttttgtaaattatttatttgaaaagaaaaaagaaaaaaattttaggtaagtaaggatgatatttatttgaatagatgttttttttgtttttttgaaagttttgaggttaataattttgattttaaaagagtattagttataatgtttttttttttttttttttgagatggagtttcgtagttttttaggttggagtgtagtggtgttattttggtttattgtaatttttgtttttcgggtttaagcgatttttttgttttagttttttgagtagttgggattataggcgtttattattatatttggttaattttttgtatttttagtagagatggggttttattgtgttggttaggttggttttaaaattttaattttatgatttttttgttttcgttttttaaagtgttgggattataggtatgagttattgtattcggtttataatgttttttaaaaaagaaattttatggttggaagttgacggggtatatttaatttttggaaaagtatattttattggttaaaatgttattataattagtaaatgattatataaaatggtatttttgtatttaatatttaatattattttgtgtttgaatgaattatttagttagttttttgattaaaatataattttttttaaaaaatttgtttataattttagtatgttatgtagttatagatgagtaagttagagaattaattttataatgaagtaattaatatttttaaaggattgtattttaaaattttaaagtgtgatgttttttattggtgtagaatgagtttaaataaggagtaaaaagatacgagttttattttttgatttgttaatgatagatgattttgggttattatgttatttttttgagttttagtttttttatggtgagaatatagtagttttttttttatttttaggggatgtattttaagattttttgtggatgttttaaattatggttagtattaaattttatatatattgtttttttgatttgataattaagtttgttattaagtgatttgtgggtgggtagtatttatagtgtagataggttggatatagggatgatttatgttttaggttggatagtgagatggtaggatagtataagattttattataaagaatgttattataattaaaatagataaggtatgtgaatatgttttataagttgaaaagcgttatataaatgttaggttttgttttagtggttttgtttaatgtgtcgagatataatttatattgtttttcgaggtggtgttgaaatagtggaaatgtaacgagatttgttttgttttttaaattggatttggttagattggaaaataaattaaatatgtttgagtagaggttttgaaaagaataaatattaaattatggaaatgttttttttatttgattttttggttggaattagtttttaaatatattttaatttgaatagagttatgttaggattttttataaggtaaatttagttagttttaataattgaaattatttttttggtttttattgaattacgtgtgtatatttatgtagggatatattgttaattagttagattggcggtttttaattagttatgattttgtttttaggggatattggtaatgtttgaagatattttgtttttttttttttggtagagattggggttttgttgtattgtttaggttggttttgaatttttgggtttaagtaatattttcgttttagttttttaaatgattgggattataggtgtgagttattatatttggtttgaagatatttggttgttataagttggagtgtggtatgttggagttttggtagtatatgtattgaagttagtaatgttgttgaatattttgtagtgtataggatagcgttttatagtaaagtatttgatttgaagtgttagtggtgttgaggtttataataagtttttgtgtaatgaggatatttaaaagaaattaaaatgttgataacgttattgttgggtttttgatatgttgttttagggtggaagaagtatgtgtaattaaaggaattaagttttttgtttattttgaagtttaagattgtttcgtatggtatttaaaatgagggagattttttttttttgaattaaaaatttttatttattttttttttttgtaataattttttttttaaggtttttttgtagtagtaatttatacggttttttatacggtagtgtggtagttttttggggaaggaggtatatgtagaggagtttataatttttgttttaaaaagttaagtattataggatgtaacgtaaatgaaagatgtagtaatttttggagttatcgtgatttttttgttaagttgttagtagttttttaggttggaaaatgggtatggttataatttaattatttttgaataggttttagaatgattatgtttaaaaagagatgtgtggttggatgcggtggtttatgtttgtaattttagtattttgggatgttgaggtgggaggattatttgaatttaggagtttgagattagtttgggtaatatagtgagatttcgtgtttaaaaaaaaaaataatttagttgggtgtggtgttgtgtggttgtagttttagttttttgggaggttgaggtgggaggattatatgagtttgggaggtggaggttgtagtgagttttgatattatgttattgtattttagtttgtgtaatagaataagattttgtttaaaaaaaaaaaagatgtgtaaaaatattttagttaaaggtaatgtttgattatgatataaataatagtagtatagtaaaggatgagtatttttaatgtagaaatttgaaatgttttaaaattttaaacgttttgtatgtttgtatgatgtttagaggttatgttttatagaaatgtttattggagattttggattttggttttttagattagggatgtttaattgggtataaggatatattttaaaataaaaaaaaatgtaaattagaaatatttttggttttattttaaataagggatatttaatttgtataaaatatttagtgtgtataaatgaagtatatgttaagttttaggaggagttttgtttgtttgagttttattaaaaataaggtaatattttatggttttttttttttttttttttttttgagatgaggtcgttttgttatttaggttggagtgtagtggtgttattatagtttattgtagttttgattttttaggtttaaatgatttttttattttagtttttcgagtagttgggaatataggtatgcgttattatattcggttaatttttgtattttttatagagatagggttttgttatattgtttaggttagttttgaatttttgggtttaagcgatttgtttattttggttttttagtgtgttgggattataggtatgagttattatatttagttaatattttgtatttgaattaagtagtggatatttattggattttttggggtcgatgttatttttaaaagtgattgagtaaatattataggtgggtaaattaaagagaaggatattttggttgttttaaggtttaggtaatttaggttatggtataggtgattttgagtttaggaagaatttatttatgttttaggggtttagttgtttttttttttttattgttggagtatttataatagttgtgaagtattttgtgtttttggagttttgatatgggaaggaataggagaaagtaggattgatgtttttagattattttttaggtaaattttttttggtagtattttagatttaaatattttttttttttacgttacgttgtttgaatttttttattttagtttgttgtattgttaaatattttatttggaataataagtatttttgaaaaaaaaaaagtatatataaattttagtttttttttgaggtttagttttaatagtatttttttttttttttttagaagtaagttttttgggtttgaatttttatagtatatattttgatttatagtatttgtgatttgttattttatatttttatggatgtattttatttgttttgttgtattgtaggtttttcggtttttatttttttttaatttttaatttttatgggtatatagtaggtatatatatttatggtatacgttagatgttttgatataggtatgtaatgtttaataattatattatggaaaatggggtatttttttttttatttatttgtgttataaataatttagttatatttttagttatttttaaacgtataatgaaattattgattatagttattttgttgtgttgttaaatattcggttttatttatttattataattatttttgttatttattaattatttttattttttttttatttttttttattattttttttagtttttggtaattatttttttattttatatttttgtgggtttaattgttttgagttttagattttgtggtttttttgattatgtagattatggtttatttatttttatatttagataggagtttgcgtagtgtttggttaggagtaggtataagtgtgtgtaaatagaggaataaatagtagggtagtaattatgtttggaggttattgttttttttgttttagtagtaattaattattgtttatttttaaaaatttagagtaggggatggggtagttagtggggatagagggtagatgggtaagatttagagtataggttagtgtgacggaagtttaaatttgtgagttaaatagggtttggtaatttagttggatagtatttttgttttttgaagagatgtttttgtggcgttatattattgatttaggtataatgtttagagatggattagaattgtataatgaattagtggtgaggtttagtttaatggaaattggtgaaagtttttaggataaaatgataatttttgttttttttagg

SEQ ID NO: 2152 - DNA, 13084 bp, Artificial Sequence
  chemically treated genomic DNA (Homo sapiens)
tttgaaagaaataaagattattattttattttaaaagtttttattaatttttattaaattgaattttattattagtttattgtgtagttttaatttatttttaggtattatgtttaagttagtagtgtggcgttataaaaatatttttttaaggggtagggatgttatttagttagattgttaaattttatttaatttataagtttaaattttcgttatattagtttgtgttttgaattttatttatttgttttttgtttttattaattgttttattttttattttgggtttttgaagataagtagtgattgattattattgagataggaaagataatgatttttagatatagttgttgttttgttatttatttttttatttgtatatatttatgtttgtttttggttaggtattgcgtaggtttttatttaggtgtgaagatgaataggttatgatttgtatggttaaaggggttataggatttaaaatttaaaataattgagtttatagagatatagaatagaaggatggttattagaggttgggaaaggtagtgagggagggtgggagggaggtggggatagttaatgggtgataaaaatagttataatgaatgaataaggtcgggtatttgatagtatagtagggtgattatagttaataattttattgtacgtttgaaaataattaaaagtataattggattgtttgtaatataaataaatgagaagagggatattttattttttatgatgtgattattaggtattgtatatttgtgttaaaatatttaacgtatgttataaatatatatatttgttatgtatttataaagattaagaattaaaaaaaaataaaagtcgaagggtttatagtgtagtaaggtagatgagatgtatttatggaaatgtgaaataataagttatagatgttatgagttagaatgtgtgttgtaggaatttaaatttagaaagtttatttttaagaaggaaaggaaaggtgttgttggagttaagttttaaaggggagttgaagtttgtatgtgtttttttttttttaaaggtatttgttattttaaataaaatatttggtagtataataaattaaggtgaaaaaatttaggtaacgtgacgtgaaggaaaaaaatatttgggtttaagatgttattaaagagggtttgtttaaggggtggtttggagatattagttttgtttttttttgtttttttttatgttaaggttttaaaagtataagatgttttatagttgttgtaggtgttttagtagtgaggggaggagggtagttgggtttttgaggtatgggtgagttttttttaagtttaggattatttgtgttatggtttgaattatttggattttgaaataattagaatatttttttttttgatttgtttatttgtgatatttatttaattatttttagaaatggtatcggttttaagggatttaataaatgtttattatttgatttaaatgtaagatattggttgggtgtggtggtttatgtttgtaattttagtatattgggaggttaaggtgggtaaatcgtttgagtttaagagtttaagattagtttgggtaatatggtaaaattttgtttttatgaaaaatataaaaattagtcgggtgtggtggcgtatgtttgtgtttttagttattcgaggggttgaggtgggaggattatttgagtttaggaggttaaggttgtagtgagttgtgatggtattattgtattttagtttgggtgatagagcgattttattttaaaaaaaaaaaaaaaaaaaaaaaattataaaatattattttatttttggtaaaatttaaataggtagagttttttttagggtttaatatatgttttatttatatatattggatattttatataggttgagtattttttatttgaaataggattagaagtgtttttgatttatatttttttttattttggaatatgtttttatgtttagttaagtatttttaatttgaagagttaaaatttaaaatttttagtgagtatttttgtagagtatggtttttgaatattatgtaggtatgtaaaacgtttgggattttgaagtattttagatttttgtattggggatgtttattttttattatattgttattatttatattatagttagatattatttttgattaaaatatttttgtatattttttttttttttagatagggttttgttttgttgtataggttggagtgtagtgatatgatattagggtttattgtagtttttattttttaggtttatgtgatttttttattttagttttttaaggaattgggattatagttatataatattatatttagttaagttatttttttttttagatacggggttttattatgttgtttaggttggttttaaatttttgggtttaagtgatttttttattttagtattttaaagtgttgggattataggtatgagttatcgtatttagttatatatttttttttgaatatggttattttgaaatttatttagaagtggttaggttatgattatgtttattttttaatttagggaattgttggtagtttgatagggaagttacggtgattttagaggttattgtattttttatttacgttatattttgtagtgtttggttttttaaagtaaaagttgtgagtttttttgtatgtgtttttttttttaaaaggttgttatattatcgtataagaaatcgtataagttgttattgtagggggattttgagagaagagttgttatagaaaaggaaaataaatgaaaatttttaatttagaaaaagaaagttttttttattttggatgttatacgaaataattttgaattttaaggtgggtagaaagtttagtttttttaattatatatattttttttattttaaggtaatatattaaagatttagtaataacgttattaatattttgattttttttaaatgtttttattgtataggagtttattgtgaattttagtattattgatattttaggttagatgttttgttgtggggcgttgttttgtgtattgtaggatgtttagtagtattgttggttttaatatatatgttgttagaattttagtatattatattttaatttgtgataattaagtgtttttaggttaggtgtggtggtttatatttgtaattttagttatttgggaggttgaggcgggaatattgtttgagtttaggagtttaagattagtttgggtaatatagtaaaattttagtttttattaaaaaaaggaaaataaaatgtttttagatattgttaatattttttgggagtaaaattatggttagttgaggatcgttaatttagttagttagtagtgtatttttatatgaatgtatatacgtggtttaataaaaattaaaaaggtagttttaattgttaaaattagttgaatttgttttataaagggttttaatataattttatttaaattaagatgtgtttaaaggttgattttaattagaaagttaaataaagaaggtatttttataatttaatatttattttttttaaagtttttgtttaagtatgtttagtttattttttaatttaattaaatttagtttgggaaataaagtagatttcgttgtatttttattgttttaatattatttcggagggtagtatagattgtgtttcgatatattagataaggttattagaataaaatttggtatttgtgtggcgttttttagtttatgaagtatgtttatatattttatttattttagttataatgatattttttgtggtgaaattttgtattgttttgttattttattgtttagtttgggatatgaattatttttatgtttagtttatttatattgtagatgttatttatttataagttatttagtagtaggtttggttattagattaaaaaaatagtatatatagggtttgatattaattatggtttgaagtatttatagggggttttggaatgtattttttgaaaataagggggagattattgtgtttttattataaggaaattgaggtttagagagataatatggtggtttaaagttatttgttattggtagattaaggagtagggttcgtgtttttttattttttatttaggtttattttatattaatagaaaatattatattttgaaattttaaagtatagttttttgaaagtgttaattattttattgtgaaattaattttttgatttatttatttgtaattatataatatattgaaattgtaaataaattttttaaaaaggattgtgttttggttagaaaattaattgggtgatttatttaagtataaaataatattgaatattgaatataagaatgttattttgtatagttatttgttaattataatgatattttaattaataaagtgtatttttttaaaaattgggtatgtttcgttaatttttaattatgagattttttttttgaaaagtattataggtcgagtgtagtggtttatgtttgtaattttagtattttgggaggcgaaggtaggaggattatgaggttagggttttgagattagtttggttaatatagtgaaattttatttttattaaaaatataaagaattagttaggtgtggtggtgggcgtttgtaattttagttatttaggaggttgaggtaggagaatcgtttgaattcgggaggtagaggttgtagtgagttaagatggtattattgtattttagtttgggagattgcgaggttttattttaagaaaaagaaaagaaaagtattataattgatgtttttttgaaattaagattattaattttaaaatttttaggaaaataaaaaagatatttatttagataagtattatttttatttgtttgaaattttttttttttttttttttagatgagtagtttatagagagagatatataattaaatgttataaatttttttattttatagatattatagatatgtgaattttattttggtgtttttaggattagagaattttgaatagttagaggggaaaaaaaaaaaattttaaaaaataaattaaaagtagagaaatattagttgggtttttatatttgtaaatatttatagtaagtagtttagtgtagttttagaataaggaatttaaatatgagttagaatatagattattttaatcggttgttaattggtagtttttttttttaataaagagtagttattcgttgtattatgttattttaggtttatttagtaattagtttagttgtttgggtttttaggaatatttttgaaatgtttgtttataaaggtttttgatttgtgcgtaatcgttatagaagaagattattttttgagtttttaggtattgttttatattgttttttaagtaatataagaggtagtttattttttgtttttgttgaaatatagagtaggatttgaggaaagtttatttgttaaagataaatttagtgatgttaagttggaataaggggaattggtttttttttaggattttttttttattatagttttttggtattaaggaaggtagagttattttttgttttttatgattgatttttttttttacggaaaagttgaatagtttaaaagagaatatatgatatttggttaatagcgaattggaagtatatagtaagtatagtttagattggtttttaagttatttatttagaatttaatgagaagatttagtttaggtattagatataaggagttatttttgagtgggagtttgtgttttaaacgattataggaaagaagagttatgtttgagattagttattataagtattaagtatataagtttataagttatttggtatttaaggttaatacgagattttgaaggtatattatatgaataaaggttttggttgtagttaaggtttagagtttggttaatgagggttttatgtaaaaaggtatttaaattatatatgagattagtattagttttttgattttattaagtgaaaagtttttgtaaagtatttatgtatatttgtagtatagcgaattattatagtttaaagatcgtttaatagagcgagatatttattttatttggatatagttagttttcggggttaatttattaggcggtattcgtttttttttgttttttacgtaatttagtgaggtatttttttagtatttttaagtgttaaatatttaaggattattattaaatttttttttagaatttggattaagtgttgattttaaatattatttttaaatattatgaatttaggaagttgtttaagttttttaaagattaaggatggggtatgattatttttagaatgagagattttattttaaggattgagagttaatgtttaaaagggagattattgttgtagaaaagtaaatgattattatttaattttattttttatggaaatatataattttttagtatgaaatgtttataaatttgaggtaggttaggcgtagtggtttacgtttataattttagtattttaggaggtcgaggtaggcgggttatttgaggtcgggggttcgagattagtttgattaatatggagggatttttttttttttattattattattacgaaaaatataaaattagtcgggtatggtggcgtatgtttgtaattttagttattcgggaggttgaggtaggagaatcgtttgaattcggtaggtagaggttgcggtgagtcgagatagtgtcgttgtattttagtttgggtaataagagcgaaattgcgttttaaaaaaaaaaaaaattttaggtaaataaattagaattttggaagttgacgaaagttttttttttttaggttttgtgtttaagtagttaattgtattagttttattttttttagaattaattgagtttttttttattttttttttagaattttagagatagtttgagttattgaggtttaggtgtttttattgcgtagtaatttaatttttagagttattttataaatatttcgtagtttttggaattcgtatggcgaatttgaagggtaaggttgaaatttaagttttagtttttattatgcgttttcgattttttggatttgaacgtttattgtttagagggtaatcgttttagtgtttttatttgagtattcgataatttagaataaatttttaaatatgttgtgaaagtttttcggtagggttttgtacgttaggattaatattttgttatatttattattttttgggtatagatagtttgggtagggaggggtatttgattcggaaaagtttagagtttgtagtttttgtaaagtcgggttatgtttatttaggttatggggtaagtattattttttgtgggattagtaattagatagcggttgtagttcggtcgtagttggtttcggtggaagaatttattcgcgttttatagcgagattttttttaagtttagttttagttgatgtttaaaaggggtcgggttagttaagttgtgggtttcgggaggcgttttatgtagttttgggaagttttttcgttttttcgcggtcgtgatttggggaagggtgacggggttttaattttaattagagaaattggagcggtcgtttggtttgttgagcgagttttttcgttttttttcgtagcgggatttggtgggattggggtgattagattgcggttcgttatcggatggggtttattttggggtcgtagagcgtaggcggcggaggtgcgacggcggcgaagtttacgaggtttcgtagaaggtggttcgtgtcgtttcggggacgtgtgtgggtttcgtaaggtgttgttaatttttttcgaacgttagcgttttcgataattaaaggcgattgtttcgggtttagatcgttgttcgtcgtttcgtttttggagggtagagtataggttgtggggtttttcgcgcgcgtttcggttcggtttcggggagtcgaatttttttcggatcgcgttttaagtagcgttcgggcgtttttttttttgttcggtcggagtcgcgtttttcgcgtttcgcgtagtttatcgttcgttggttggtttcggacggttgttggcgaggaggtgttgcgggcgtcggcggggcggtggtttcgagttttaaatatttttagtttcgttcggttcgtttttttcgaggcggggcggcgtttttgtttagttagtttttttttcggattaggttgggcgagtttcgcgtcggttagatatttcgagtcgtcgtcgtaggggcgattaggaagttttcgacggggagagcgcgggtattgaggggcgcgattttcgttgttatcgttaggtttcgtggcgttttcgggatttgggttgcggtcgcgtttgtttttcgttttttttagaattatttgagtgaagaattcgttgagaggaatttaattaataggttgttttatttgtagaatataaaattaaaaatttttttaatgtttattttttagggaattgattataaattgattatttattttagattaataggtttagttttaaagtaatttttttataaagtaattaattagataattttttaatatattttatataggaaatttatattatatatatatatattttttttttaattttattttatttttttgttggaagaaagagataagtattattattttatttttattgttagggtgttatagtttgaatgtttatatttcgttaaagtttatatgttgaaattttaatttttacggtgatgtattaggaagtggaggttttgggaagtgattaggttataggggtagggtttttatgaatgagattggtgttttaataaaagaggtcggagagagattttttgttatttttattttgtgaagatatagttagaaggttttttttgtgaattagaaagtaggtttttattagatattaaatttgttggtttggattttggatttttcgatttttagaattgtgggaaataaatgtatattgtttataagttatttagtttatgatattttgttatagaagtttaaatagattaaaagagaaaatgatttatttatttaagtttatttatgtttaggaataaaatttagaaattttggtttttatattttatttggaaaagtattaggttaaagaatttttgtaggttggaataaggatttttgaggaaaaaaaaaaaaattaaggggggtaggggaagaatttttgtagggattggtttatgtaaattatggagaaaattaggtattatttggtttttaaataatttttgtagtttttatagtaattaattaataatataaagataaattattttttgtagttttttaatttagggaaatgtttttgtgaaggatttatttgatggaattgagaagttgttttggtattttttaggataaatttgaaagtgttttagtggttggtacggtttttgtaatatcgttttttttaggtttgtatatagaagttatagtgtggttggggattatttatgtaagtttgaatttttatttgaagaggtagtttggtaattaatttatttgaatggattatttatagtaaatgattaatttttgggtagtaaaaaggtattatttaaaggaatgtttttggtttttagggaaaatgttataaattttaagattttgagttatgaggttttatggttaggagtggtatttttagagggttagttattggtaataagaaaagtagatagttaaatgaattgttgtggaggtaagggatgaattatatttttgtttttttttttggttattttagagatagataaagtttatgttttggttatttagggggtttgtttatatttgattgtatgattagatatgtttttggttttttttttttatttgtatatttttatgaatattttggtgttaattttatgttttataaagttaataaaaggattttgttatgattagggtgtgtttgggaatttataatttgtatatatgtaataaacggttttttattatttaatttaaagttatattttttttttaagataagcgtaaaaaggaatttaataaaattaattaagatattattgagtaatttttatgtatagtttattgtgttatttgaaatagggataaggtaagtgttagtttttaaataaaaaggttgtttggtttttacggatgtagagattgtaagtcgttgataaaagtaaggattttaagagaggtatttttataggagggaaaggaggaaatttgggaaagtaggtggttgtttagaaggttaggagggaagttgcgtgagaattttagttagagttagaagagagtaggagatgaagatgagaataaaaagggaaagtttttaaggataagtagaaaagagaaagaaagatagtaattggagaagaaagtagagtcgattatttatttatttattttatttttttgagacggagttttgttcggtttatcgtaatttttatttttaggtttaagtgattttttttttgttttagtttttttagtagttgggattataggtatgtattattattttggttaatttttagtagagatggggtttttttacgttggttaggttagttttaaattttttattttaggtgatttgtttattttagttttttaaagtgttgggattataggcgtgagttattgcgttcggtagtaaagttagttttttaaagttattttttaaataggaaaatagaattagagagaaaggaaaaagagaggagaatagaagaattatgaaaatataaaaagtgagtgaatttggaataagttagaaaagaggagagaaattttttagaaattagtattatagtgggttagatagggaaagaatgttttataaaagttgaagtttttatgaaatataaataaaaattttggtattaagtcgtgtagatagtagaatataggaatagttagaaaagagtaaagcggttgttttttagtttttatatttggattttgggtagtttaggtaagtttggtaattttgtgtttatatggtgttaatatatttgggtgataagtgaagagttgagttaggttttagggtatttggtttttttggtgttaataattggaatttgggtggttggtagatttagggattgaaagagaggttgagtgttttggggaattatttatgttttgaagataaagtaatttttagttttagaacgaaatgattgtggttgtttgttgtttttagttttagttatttatatgtatttatttatatttaaggtttttagtgggggtttaatatatgttttaattattttgtaaaatttattttttttagtttgttgaatgaataggtttattaaaatttggttaataaatgaaatagggttggtggtagtaatgtgtttaatgatggtttataaggttttattatttgggttgtaattagagttttttgggatagagtgagagttagaatttgtttagaagggagttagttttttttgttttggatgggtaggttaatagtattagggagaagaggtgttttaggtgttatcgtaggtgtaaaattttttttttagtttaattttagttttggttattttagtttaattttttttgtttgttttttaagtttaatttaggtttgtttttagtattagttattattaaatttatatttttattagttatttttgtttatagataggaagtggttgttgttattattattgtttttattgtagttatatttagggttacgtttttaattacgttatagtattaatttgttttttgaggaagtataaaattagggaaagggatagagagtgtgttagtttgttaaggttgttataataaagtattaggaattgagtaatttaaataatagaaatttatttttttttaattttggaggttagaagtttaagattagatgttggaagggtgggttttttttgaggtttttttttttggtttttacgtttttttatatttttatatggttttttttatatgtttgtttgtgttttaatttttttttgttagaaggatatattcgtattagattaagattttattttaatttaattgtttttttaaaggttttatttttaaaaatagttatattttgacgtattcggggttcggatggtattgatataaatgtttttgtaaagagagagggatataatttattttatattagagaagggtaggggaggagttggttgttagtttagtaagtgtggttagtagagatttttttaaggaggtggtatttgagttgagatttaaataaggagtaggggtaggtttgtaaagagtcgagaaagtgggaatggtaagaataatattgtgagttgtaatagggatttgtgttagtatagatatttatggggtattttttgtttattttttttagaattttttttttgttatttttataaagtggttcggtaatcgagttagtattttatgattttttattttaagtggagttgggagaattgtggagttttaattgggggttgggggaagtggagaattgggttggtgggattaagggaaagtaaaaagagatagtaggttgggcgcggtggtttacgtttgtaattttagtattttgggaggtagagatgggtggatcgtttgaggttaggagttcgagaatagtttggttaatatggtgaaattttatttttattaaaaatataaaaattagttaggtatggtggtaggtgtttgtagtttagtttgggtaatagagtgagattttgtttaaaaaaaaaaaaaaaaaaaaaaaggtagataagttataagtttgtttttttttatggtttaggatatatagtttttttgcgtaaataatttataatttgtttgtttttagttttttttagatttttggttgatagaaaaaatgtacgttagtttattgtaattttggtattattagtattatataaaattttttagtacgtagtacgagttttattttataaaatttttagttagtttttgtttttttttatttagttttttttttgttagttt

SEQ ID NO: 2153 - DNA, 7623 bp, Artificial Sequence
  chemically treated genomic DNA (Homo sapiens)
gagattagtttgtttaatatggtgaaatattatttttaataaaaattagttgggtgtagtggtaggtgtttgtaatttaagttattcgggaggttgagataggagaattgtttgagtttaggaggtagaggttgtagtgagttgagattacgttattatattttagtttgggtgatagagtgagattttattttaaaaaaaagagagagagagagaagatttagagtaggaataaaaagaaagtaaagtacgtttggaagtaggttaagtagatattttggaggttaggtgtggggtttgattttttgaattagggttttatatgttggtatatttttggggttttgggtttttttttttttgattttttttttggggtaggaagtattagtataatgttttatttgggaggggagtatatgtagtgtgtttattggagttgtacgtatgtttatttgaggtgtttttttttttattgatggaatgtttttagaaggttttagatgagttaaattttattattttgttttttgacgcgtatgtatgagtttattcgtttaatttttgggattttattaggaagatgttgatgattatttttaggttttttttatttataggtatattgtttttttttggtgttggttgtaattaattattattttagagagatagttaataattttttgattattatttgatggttatttgatatttttggttgggaggagttttttttgttttgtttatgtatgattagttatttatagtaataatttttaagagatttcgtttttaaatttaaagaatattaagaaaaatatttaaagatatagttaatattaattttatatatatttttattaaagtatataaatttatatgtataattagtatattttggaaaattgttttataaaatttaaaagatagtattgaattttaaataattttaaataataaaatattttttatttaaaaaaaagtttaagttttatgtttatttttagtgtgatttgtttaagaaattaataggagaaaattgattaataattaaataatttttataatattaaattataattgtgttagaaaaatgttttgagaaggtgataaaagtttgaaattattataatttttaagaaagtaaatataaatttatattatattttatattttttttattaaaagagttaattttgaagttttaattatagtttaggaaacggtgttttggttgggtgtggtggtttatatttgtaattttagtattttgggaggttgaggtgggaggattatttgagtttaggagttggaggttatagtgagttatgattaagttattgtattttagtttgggtgatagagtaagatttagtttaagaaaaaaattaaaaaataaaaataaaaattgttttttattatttgtttagatgatataatattgttatttatttaatatttaatttatgataattttatgtagatttttattttttagtaatttttaattgattttgttaaattaattttagtttaaagttgtttttttatttattttaagtttagtttaatttgtatatagtgaattgtaatttgaatcgaggtgtaaataggttgtaatttattttcgtgttaattattgagttttgtttagttaaaggggattatttatttaaattatgtttgaataaggtaaatatttagttgtaataaatttagttgttgttgtattttatttttattttttgtgattatttttttttttttgtttataaattttttattacgtggttgtgttggagtttttatgaatttattttggtttaagaggtttttttattcgtaaattgttttttgtttagttaaattttgttaaatttaatttggttaaggtttttagtaatttttttttttattaattaagagagtaatatttgttttttttttattattattattttgtatttgtatttgtagatttatattatttgttttatattaatgaaattaattttgtaaaaattataatagtgagaaaattatgataatgggaagatttgatttagtttattttttttttgtttttagtttttaagttgttagatatttagtttatagtttagatgattagtttttttttaaaatttaattatttttgtaaagttaatgagagattattaggttaggaggatagaggagtttgaattttgttaaggtgaaagtgtagatataaatgattgttagttattattgtggaggttataagatatgtaattttttaattttttttgtagataatattattattgtagaatttaagtttggttttttgagatatttttttaggtttttttttgtattgagatattgatgatggttttatttggatttattaatagtttttgcggtattatttagaagttatttagtttataggaggtgaattttttatatttttatgattgtattttttaagtagttagtagtaagttttttttgtttagttatatttatttttttttttaaattattttttaaaaatttttaatttgtgagttttcgatgagattgatttgagtaataattttttattgtaatgcgatggtttttgtgtagtaggtacggtatttattttatcgttggagatattttttaaggattttgtaattgtatatttggaagtttgttaagggggtaaattttatgttatgtggttgatttgttttgttttgatatagggttttattttgttatttaggttggagtatagtggtgtgattataggttattgtagtttgtagtacgtttaagtataagaaatttttttgttttagttttttaagtaattgggattgtaggttcgtgttattaagtttgtttttttttttttgtagaaatgaggtttcgttttgttgtttaggatggtttggaatttttgagtttaagtttaagtgttgggattataggtatgagttattgtatttggttatgtttttttttaatgttttatatatatatatatatatatatatatagtttgttgtatgggggcgggggaatgaggagagttattaaataaataagtatttaaaatagaatgtgattggtgttatcgtagatttaagtattagatagatgttgtattagaaatattgaaaagggatatttggtttagtttcgtgggagcgatagttaagaagtttttttggtagagttgattgttgagtagagttaatgggttgttaggaattagtattgtatagggttaatttatttattaggtatttagtattggggttttgaaaaaaaaaattaattttaaaagaaaaaagtataaaatttaaattaataggtgtattattatttaaatttaatatgtatttaaatgttattatattagaaattagaggagttgtgtatataaggagaattttattttgaaggattttttatatttatatataaattttggagttgatttaagtttatgagaagttattggtagattttgtttgaaaaattatagttaagttcgtagattagagaattttttttggtggttattttttattataggttttggaggtatttgaaggtttaagatggggtggttagaatttgacgtggtattattagtgtttgggaaggttttttagtttttaattttgagattttttagttttttattttcgtggttagtttgatttatttttatttttgaagtttttttgtttgggaggtcgaggtaggtggattatttgaggttagtagttcgagattaatttgattaatatggtgaatattttcgtttttattaaatatataaaattagttgagtgtggtggtatatgtttgtaattttatttatttaggaggttgaggtaggagaatcgtttgaatttagaaggtggagtttgtagtgagtgagaatgtattattgtattttagtttgggtaataagagtaaaatttcgttttaaaaaaaaaaaaaatttttgttttatagtaggtagttatttagatatgagtagggcgggagagttttttgttttattatgaatgttagataattattagatgatggttaggtagttgttatattgtttttttaaaatagtaattggttaaagttagtattagtaaagatagttttttaatagatagaaatattttaaattggtgattaatagttttttattaagattttaggagttaggtaagtaggtttaagtatgtgtattaagaggtaaaatggtagagtttaattggtatgtgatttaggaatatttgattggttaagaaggaatgttttaagtgagtatgcgtataattttagtaagtatattgtgtatgtagtttttttttagtgttggtagattattgcgtatgcggaatgttagtatataaaattttaatttaaaggttaaattaggtatttgaatttttttagttatttgtttggtatttttttaagtgttttttatttttatttttgttttaaattttgtttcggttttttattttgttttatattttttagttgaattattttttttgaggaggtaagaattgaggttgttgtagattgatatggatttattattgttaatattttttggttggaattataggaatagaattggaaagggaaaaaaggtagtatttattatattttaattttgaatttaagagtttaagatagttttttatttttattttaggtttagaggattagattaattttttggagggaagatttttttttgaaatatttttttttatttgtttgtagttattgggataattcgggaaatttatagggatagtttaagttatttttgttttttattttttgttgtatttttagttttgttttttttttagaaattgtatggtaattattatatagttaaagaagagtattttgatttttgttttgggattttttggatttttttttttttataaatataagggtagagttggtatttcggggagttaggaagtagtgagtttaggagttttcggttagttttgtttgtttattaggaggatgaaggttttcgtggttgtttttttttgttttatgtttgttgttgtttttggattttaggtttagtttataaatggtgagtttagtgagtttttttttaggtgattaggtttatggtaatttaagttttgggacggagatatgttgtgattattttttagtttagatatggttatggaatttatttaaaaagtattagtagggtatagatttggttttgtttgtagtttttggattttggcggggaaaggtatatagatgattggttttatttggggttaattatttttttttttatagtaaaaattatttgatttttttttttagttgatattttagttggaataaaagaattgtaattaaattgtaaatttgtaaaaagaattatataattttatggtgttagaattgttatttattatttggtgtaaaattatgatttgtgagaggaaaaggaattagttaggtaagtgatttatttaagattattgttttatttgtttttgtggaattttaatttgtggaggtgaatgttaacgtaaagaggttaatgatattgaaaaaagaatgtattatttatattttttaagagaaggaggtatatcgtgatatacggggttttaagggaagtatttagggtaggagttacgggtaggagttacgggtaggagttataaataggagggaagggataatttatgttagaatttttattggggtttttcgggggaaagtaaggtagtatagagtatatattttagggttgggtagtttgaataagttttttaggttttggggtatagggatagtttttagttgtttagtatttatttttaggatgatttagagtagtggaaatattggtttggtgtgtgtgagttagtaaaggaggtggatgggtatatgggtttaggattttttgatttgtatatgaaaggtttaaatttttagttatttttatgaattggttagttttgtaatgggtagtttttttcgagttgttaagatttttttttttttttttttttttgagatggagttttattttgttttttaggttggagtgtagtggtgcgatttcggattattgaaagttttgtttattaggtttaatgaattatttttttttagtttttagagtagttgggattaaggtatgcgttattaagtttagttgatttttgtgtttttttagtagaggcggggttttattatgttggttagattagtttttaatttttggttttaggtgattcgtttatttcggttttttaaagtgttgggattataggtgtgagttatcgcgtttggttattgtaaagatttttttttttttttttttgagatggagttttattttgtcgtttaggttggagtgtagtggtacgattttagtttattgtaagtttcgttttttcggtttacgttatttttttgttttagtttttcgagtagttgggattataggcgtttgttattacgttcggttaattttttgtatttttagtagagatggggttttattatgttagttaggatggttttaattttttgatttcgttatttgtttatttcggttttttaaagtgttgggattataggtttgagttattacgtttggttgtatttttttatttagtataatataggtatgtaattttttattaaaattttattaggttagatgtattttggaatatagaatttttttggtttttaaaaggtaatatacgttaggtatggtggtttatttataattttagtattttgggaggttgagttaggagaattgtttgattataggagtttaagattagtttgggtattatagtaagattttattattataaaaaggtaaattattagttaggtattgtggttcgtatttgtagttttagttttttaggaggttgaggtaggaggattatttgagtttaggattttaaggttgtagtgagttatgattatattattgcgttttagtttgggtgatagaaaaagattttgttttaattaaaaaaaaaaaaaaaagtaatatatatttagatggtatttatttttggtggggttaaggaagattattttaattaaatatagtaatttttttgtagtaaatatatgaatatttttgttaattgggatgaataaatattataatagatttattttatttaaggggatattgtgttattataaacgttgataaaatttttttgtttttagagttttataataaaaaattattttagaaatgtgtagaaaaatttgtagattgtgttatattatgtagatattttattaattgaatcgtgtgaggtttagttgtttttagtattttagagttaatataaagtttttatgtttatatttttaaaaggtttttgaaaagttttagggttttaatggaataaatgggttaggaggtaggtttagaatttagataggtggtggtggtttagttttagagtttttttgttttaggaggaggatgagtaatggggtgggtggagatgttgaaatatattgttgttatttagtgatttttttttttgtattgttttttttaga

SEQ ID NO: 2154 - DNA, 7623 bp, Artificial Sequence
  chemically treated genomic DNA (Homo sapiens)
tttgaaagaaatagtatagggaaggaaattattgggtggtagtagtatgttttaatatttttatttattttattgtttattttttttttgaggtagagaggttttgaagttggattattattatttgtttgggttttaggtttgttttttggtttatttattttattagggttttgagattttttagagattttttgaaaatgtagatatgaaaattttgtattgattttgaaatattaaaagtaattgaattttatacggtttagttaatggaatgtttatatgatgtgatatagtttataagtttttttatatatttttggaataattttttattatagggttttggaaatagagaggttttattagcgtttatggtggtatagtatttttttaagtgaagtgagtttattgtggtatttatttattttagttagtagaaatatttatgtgtttgttatagaaaaattgttgtgtttgattgaaatagttttttttggttttattaaggataagtattatttaggtatgtattatttttttttttttttttaattgagatagggtttttttttgttatttaggttggggcgtagtggtatgattataatttattgtagttttgaggttttgggtttaagtgatttttttgttttagttttttgagaagttggaattataggtgcgagttataatgtttagttaatagtttatttttttgtagtgatgaggttttgttatgatgtttaggttggttttgaatttttgtggttaagtaatttttttagtttagttttttaaagtgttgggattataggtgagttattatgtttagcgtgtattattttttaaaaattagagaaattttgtattttaaaatatatttagtttgataggattttgataagggattgtatatttgtattatgttaaatagaaaaatgtagttaggcgtggtggtttaggtttgtaattttagtattttgggaggtcgaggtgggtagataacgagattaggagattgagattattttggttaatatggtgaaattttatttttattaaaaatataaaaaattagtcgggcgtggtggtaggcgtttgtagttttagttattcgggaggttgaggtaggagaatggcgtgaatcggggaggcggagtttgtagtgagttgagatcgtgttattgtattttagtttgggcgatagagtgagattttattttaaaaaaaaaaaaaaaaaaatttttatagtggttaggcgcggtggtttatatttgtaattttaatattttgggaggtcgaggtgggcggattatttgaggttaggagttggagattagtttggttaatatggtgaaatttcgtttttattaaaaagatataaaaattagttgggtttggtggcgtatgttttaattttaattattttggaggttgaggaaggataatttattgaatttggtaggtagagtttttagtgattcgagatcgtattattgtattttagtttgggagatagagtgaaattttattttaaaaaaaaaaaaaaaaaaaaaaattttgatagttcgggagagattgtttattgtagggttaattaatttatagagatagttaagggtttagattttttatatataaattaaaaaattttgagtttatatgtttatttattttttttgttaatttatatatattaagttagtatttttattgttttaaattattttaaggatgagtattagatagttagagattatttttatattttaaagtttgaaaggtttatttagattatttagttttaaagtgtatgttttgtgttgttttgttttttttcgagaaattttaataaaggttttggtataggttgtttttttttttttgtttgtgatttttgttcgtgatttttgttcgtgatttttgttttggatgttttttttggggtttcgtgtgttacggtgtattttttttttttgggaaatgtaaataatatattttttttttaatgttattgatttttttgcgttgatatttatttttataaattaagattttataggaataagtgagatagtgattttgggtgagttatttatttggttggttttttttttttttataaattataattttatattagatggtagatagtagttttagtattataaaattgtatgattttttttataaatttataatttaattatagtttttttgttttagttaaaatattagttaagggaaaaaattagataatttttgttgtgaaaagggaaataattggttttaaatgggattagttatttgtgtattttttttcgttagggtttaaaggttgtagatagagttaggtttatattttgttggtgttttttaaataagttttataattatgtttgggttggagagtagttataatatgttttcgttttagagtttgagttattatggatttggttatttgggagaaagtttattggatttattatttgtgaattgggtttgggatttaaggatagtaataagtatgaggtaggagagggtagttacggagatttttatttttttggtgggtaggtagggttggtcgaggatttttgggtttattgttttttggtttttcgggatattagttttgtttttgtatttataagaagaggaggatttaggaagttttagggtagaggttagaatgtttttttttagttatataatagttattatgtagtttttaaaaagagaataaggttgagagtgtaatagaaagtagaggataaagatgatttgaattgtttttgtggatttttcgaattattttaatagttataggtagataaaaaaaaatgttttaaggaagagttttttttttaggagattaatttaattttttaagtttgagataggagtgggggattattttagatttttggatttaggattgggatgtggtgaatgttgttttttttttttttttagttttatttttgtagttttaattaggaggtgttagtagtggtgaatttatattagtttgtagtagttttagtttttgtttttttagaagaaataatttaattgaggggtataaggtagagtgagagatcgagataagatttagagtaggaatgaaagtaaagaatatttggaaaagtgttaagtaggtgattggagagatttaagtgtttggtttgatttttggattggggttttatatgttggtatttcgtatgcgtagtggtttgttagtattagggaggggttgtatgtatagtgtgtttattggagttgtacgtatgtttatttgaggtatttttttttgattagttaagtgtttttaggttatatattagttgaattttgttattttgttttttagtgtatatatttgagtttatttgtttgatttttgagattttaatgggaaattgttgattattagtttgagatatttttatttattgggagattgtttttgttggtgttggttttgattaattattgttttagagagatagtgtaataattgtttgattattatttgatggttgtttgatatttatggtggggtagggggttttttcgttttgtttatgtttgaataattatttattatgaaatagggattttttttttttttgagacggagttttgtttttgttgtttaggttggagtgtagtggtgtatttttatttattgtaaattttattttttgggtttaagcgatttttttgttttagttttttgagtagatgggattataggtatgtgttattatatttagttaattttgtatgtttagtagagacgggggtgtttattatattagttaggttggtttcgaattattgattttaggtgatttatttgtttcggttttttaaataaagggattttaaaggtaagaatgagttaagttggttacgaaaatggagaattggaaaattttaagattagaggttagaagatttttttaggtattgatgatgttacgttaagttttaattattttattttggatttttaagtgtttttaaagtttatgataaagggtggttattagagggaattttttaatttgcgaatttggttgtgattttttaaatagaatttgttagtggttttttatggatttgagttaattttaaggtttgtgtatgagtgtagaaagttttttagaatagggttttttttatatgtataatttttttagtttttaatgtaatggtatttaaatgtatattaagtttaaatagtgatgtatttattaatttagattttatattttttttttttggagttaatttttttttttaggattttaatattaaatgtttaatgggtaaattggttttgtgtaatattaatttttagtaatttattaattttatttagtagttagttttgttagaaagattttttggttgtcgtttttacgaggttgggttaggtgtttttttttagtgtttttggtatagtatttatttggtatttaaatttacgatagtattagttatattttattttaagtgtttatttatttaatggttttttttattttttcgtttttatataataggttgtgtgtgtgtgtgtgtgtgtgtgtgtgagatattaaaaaaaaatatggttaggtatagtggtttatgtttgtaattttagtatttaagtttgagtttaggagttttagattattttaagtaataaagcgagattttatttttataaaaaaaaaaaaataggtttggtggtacgggtttgtagttttagttatttgagaggttgaggtaggaggattttttgtgtttgggcgtgttgtaggttgtagtgatttatgattatattattgtattttagtttgggtgatagagtgagattttgtgttaaaataaaataaattagttatataatatgagatttatttttttaataaatttttaagtgtgtagttataaggtttttgaagaatgtttttaacggtgagatagatatcgtatttgttgtataaaaattatcgtattgtagtaaagagttattatttagattaattttatcgaaggtttataggttaaaagtttttgaaaggtagtttgggggaggagatgaatgtggttaggtaaagggagtttgttgttgattgtttggggggtgtaattatagaggtgtgggaaatttattttttgtaggttgaatggtttttgggtggtgtcgtaggagttgttggtgggtttaggtggaattattattagtattttaatgtaaaaaaaaatttgaaaaggtattttagaaggttaaatttaggttttatagtagtgatgttatttgtaggagaaattgggaagttgtatattttgtgatttttataataatggttggtaattatttatgtttgtatttttattttagtaaaatttaggtttttttatttttttagtttggtagttttttattagttttataaaagtggttgagttttggggaagggttaattatttaaattataaattaaatgtttggtagtttgaaagttaaaggtaagaagagagtgggttagattagatttttttattgttatggtttttttattgttataatttttgtaaagttggttttattagtataaaataaatggtgtgagtttgtaagtataaatgtagaatgatgataatgaaaggaagataagtattatttttttggttaataagaaaaaaggttgttaaaaattttagttaaattaaatttaatagagtttaattgagtaaagaataatttgcgaataaggaagttttttgagttagagtaggtttatagagattttagtatagttacgtggtagaagatttatagatagaaaaagaaaagtgattataggaaatggaagtgaggtatagtaatagttgaatttattatagttgggtgtttattttatttaaatatggtttgaataggtggttttttttgattggataaaatttagtgattggtacgagagtaggttatagtttgtttatatttcgatttaggttatagtttattatgtatagattaggttgaatttaaaataagtgagaaggtagttttaggttaaagttgatttaataaggttaattaaaaattgttggaaaataagaatttatatgaggttattatgggttaaatattaagtaaatgataatgttgtgttatttgggtaaatgataaaagatagtttttatttttgttttttaattttttttttgagttaggttttgttttgttatttagattgggatgtagtggtttgattatagtttattgtaatttttaatttttgggtttaagtgatttttttattttagttttttaaagtattgggattatagatgtgagttattatatttagttaaaatatcgttttttaaattgtagttaaaattttaagattagtttttttagtagggaggatataagatgtaatatgaatttgtgtttatttttttaagggttataataattttaagtttttattatttttttagggtatttttttaatatagttgtgatttagtgttataaaagttatttggttattgattagtttttttttgttgattttttagataaattatattaaaagtaagtatagagtttaaatttttttttaaataaaaaatgttttgttgtttggaattgtttagaatttagtgttgttttttgaattttatgagatagttttttaaggtgtattaattatatatataaatttatatattttaatagagatgtatataaaattaatattaattatatttttaaatgttttttttaatgttttttaagtttagaggcgaaattttttagaaattgttattgtaggtagttagttatatataaatagggtaggagaggttttttttaattaggaatgttaggtgattattaggtgatggttaggaggttgttaattgtttttttagaataataattggttgtagttagtattagggaaaggtaatgtgtttatagatagaaaaaatttgaaaatggttattagtatttttttggtaagattttaggagttgggcgagtgagtttatgtatgcgcgttaagaggtaaaatggtggagtttaatttatttaggattttttgggggtattttattagtaaagggaagaatattttaagtgagtatgcgtatagttttagtaaatatattgtatatgttttttttttaagtagggtattgtgttagtgttttttattttaagggaagaattaggggagaagggatttaagattttagaagtatgttaatatgtaaaattttgatttaaaaggttaaattttatatttgatttttaaaatgtttgtttggtttgtttttaaacgtattttattttttttttatttttgttttaaatttttttttttttttttttttttttgagatggagttttattttgttatttaggttggagtgtagtggcgtggttttagtttattgtaatttttgttttttgggtttaagtaatttttttgttttagtttttcgagtagtttgggttataggtatttgttattatatttagttaatttttattagagatggtgttttattatgttgaataggttggtttt

SEQ ID NO: 2155 - DNA, 5586 bp, Artificial Sequence
  chemically treated genomic DNA (Homo sapiens)
tattttaattcgaattgacggttgattttatagaaatttgtaatttattgatattattatatatttgttgtttgttattttttttttgtttttatatgtttttttatatagtttatattttaggttaattattaattatgattgttttggttaggtgtaatggtttatgtttgtaattttaatattttgggaggtcgaggtagatggattatttgaagttaggagtttgagattattttggttaatatggtaaagttttgtttttattaaaaatataaaaattagtcgggtatggtggcgggtatttgtaattttagatattcgggaggttgaggtaggagaattatatgaattcgggaggtggaggttgtagtgagttgagattgtgttattgtattgtagtttgggagatagagggagattttattttaaaaaaaataaaaataaaaataaaaaaataatagaaaaataaaaataaataaaaattttattgttttgtatgtatgcgtgtattttttagtaaatatttgttgaatatttattatgtgttagatattattttaggtttaggggatatattagtgaatacggtagatatattttttgttttgtagagtttattttttggtggtaggggataaataataaataaattaggttaggtatggtgatttatttttgtaattttagtatttcggaggttgaagtggaaggattattttgagtttaggaggttaaagttgtagtgagttatggttgtattattgtatattagtttgggtaatagagcgagatttgttttaaaatagagaaataaagtggttatattatatgttagaatagtggtttttaagttggggttattttggtattttaggggatatttggtaatatttggagatatttttagttgtttttattgcgggagttgaattggtggtatttagtgggtagaaattatagatgttgttcgttattttataatgtataggatagttttagttatagaattattcgattttaagcgttaatagtgtttttttttagagttcgtttagaaggtgttaatgttaataaagtaaataaataaataataataataataataaaaaaaacgtagagcgggttggtcgcggtggtttatgtttgtaattttagtatttagggaggttgaagtgggcggattatttgaggttaggagtttgagattagtttggttaatatggtaaaattttatttttttaaaaaaatataaaaattagttaggtgtggtggcgtgtatttgaagtgtatttgaagaggtcgaggtaggagaattgtttgaatttgggaggtagaggttgcggtgagttaaggtcgagttattgtattttagtttgtgtgatagggtgagatttcgttttagaaaaataaaataaaaagaaaaaaaaaatataaagtagggttgagggatggatagaggaatttcgagtggagggtgtgatttgaagtagaatggttaggtttgtgttagtttttttgaggtgacgtttgagtaatattgtgaaggtggggaattcggtagatatttggagagaagatggtaatttattgggttttttattttattgagaaaatttaattatttattatatatgtttaggtagtaggttttttttttagtttttgcgaataaattgtttgtgtttttagttaaggttaaatttgttatttaagaatgtatttttattttttgtttaaggttatcgttttcgtaatttttttattaattagtaataatttatttgattttttttttttttagttatttaatgtatttttatttttttttttttttttgttgtaaagattttaaaagatttttgtattattattgtttttaatttttttttttttattggttttgagtttaagtttataagatttttgtttttaaagagttttttattttttaatttttttttttttatttgagatagagtttcgttttgttatttaggttggagtgtagtggcgcgattttggtttattttaatttttatttttcgggtttaagcgatttttttgttttagttttttgaatagttgggattataggtacgtgttattatatttggttaatttttgtatttttagtagagacggggttttgttatgttggttaggttggttttaaatttttgattttaagtgattcgtttatttcggttttttaaagtgttgggattataggcgtgagttatcgtgtttagtttggtttttgtttttgttgttgttgtttttagggataggattttattgtgttatttaggttggaatatagtggtgcgattatagtttattgtagtttcgaatttttgtttgagttttttgagtagttgggattatatggtgtatattattgtgtttggttaatttaaaataattttttttttttttgtagaggtagggttttgttttgttgtttaggttggtttggaatttttggttttaagtagtttttttgttttggtatgttaaagttttgggattataggtgtgagttattgagtttagttttgattgtttttgaaatataaagtggttaaagtttgtaatgttattatttttggaaggttgaggtaggtagattatttaaggttaggtgtttaagattagtttggttaatatggtgaaattttatttttattaaaaatataaaaattagtcgtgtgtggtggcgggtgtttgtaattttagttattcgggaggttgagataagagaattatttaaatttgggaggtagaggttgtagtgagttaagatcgtgttattgttttttagtttgggcgatagagcgattttgttttaaaaataaataaataaataaataaattaattaattaattaaattaaattaaatttaaagtcgtatattttcgagttgttttagttttgggttagtttggaaggttggttattttgtttattagtttttttattgatgttttttttttgttttaggatttgatttagaatattatattgtatttagttgttttgtttttttggttttttatttgtaatgatttgtgggtttttttttattttttatgattttggtttttttgattttttttgttttttgtttttgaggcggggttttattgtgttgtttacgttggagtgtattggcgtgatagtttattgtagttttgattttttgggtttatataatttttttgttttagttttttgagtagttgggattataggtgagtattattatatttggttaattttttgtttttgtagagttcgggtttttttatgttgttcgggttggttttgaatttttggttttaagtaatttttttgttttagttttttaaagtgttgtaattataggtatgagtttggtatgaatttgatattattgagatatattggttaggtattttgtggaatgttttttaattttgttttgttagatgtttttttatgattagaggagagttataaattttgaggaaaatttagagaggtgaagaggtgaagtagggtagaaatttaatttgttttatttattgttatatatcgagtgtttggaatttggtttatggtaagtattaaaaatttgttttttttgaatgaataagtaaataaatgagtgatcgtggaaatttagtattattttaaagttttaaagcgttgttgatataggttaggtatagtggtttatatttgtaattttagtatttttggaggtcgaggtaggaggattatttgaggttaggagttcgagattagtttgattaatatggtgatatttttgtttttattaagtaaaatataaaaattagttaagtgtggtggtaggtatttgtaatttcggttatttgggaagttgaggtagaagaattatttgaatttgggaggtagaggttgtagtgagtcgagattattttattgtattttagtttgagtgatagagcgagattttgttttaaaataaataaataaataattattttttggtcgggtaaggtggtttacgtttgtaattttagtattttgggaggttgaggcgggtagattatttgaggttaggggttcgagattagtttggttaatatggtgaaattttatttttatttaaaatataaaaagttttttgggtgtggtggcggacgtttataattttagttatttgggatttttttttaagacggaattttattttgttgtttaggttggagtgtagtggtaagattttggtttattgaagttttcgttttttaggtttaagggatttttcgcgttttagttttttaagtagttgggaatttttgtttttgtaaaaaaaaaaaaaaaaaaaaaaaaaaaatatatatatatatatatatgtgtgtgtgtgtgtgtgtgtgtgtgttatatgtatatatatttatgtatatgtatatatatataaaattaggcgggagtggtggcgtacgtttgtgattatagttattcgggaggttgaggtacgagaatcgtttgagttcgtgaagtcgaggttgtagtgagtttagatcgagttattgtattttagtttgggcgaaagagaaagatcgtgttttaaaataaataaataaaagttatttttagtacgtgttagagtatttcgcgggcggaagtgggaaacgagtgttgtatatagagtaggtatttttatatgttaatagatattgatatttagttaaagcggttgaatatatttattttttggtagtgtttaaaagtatttgttttttttatattgttttattttaattttttttggattaagtaatttgatttttttttttataatttgtcgatcgattcgtgatagtaaaatcggtagaagttcggcgattttttatttcgagtttgtaggtagtgttttcggattatattttttagaaggtattgcgggtacgttttttgtttggtcggtttgaagggaagggttaatttttgagtatttcgggaaggaggtgttcggagtcgcggatttagagattttagaagttatagcgtagcggttcggttcgttattatttttaggttttgcggggtaggggtgggtttagattttatttttcggcgggtagtgcgattttaggggcgggattttatgttttagtaggtttcgggcggcgtgcgtcgcggtgtttagtgtgggatgtaagcgcggaggtgggcgagggggatcgaggttaggattttttttggggtttgggggtttgatttgggtgcgttttttggatagattttatagtttcgggggtatagtcgtagagagggggcggggcggttattggggttttttattggggtgtttggggcgtattttatcgggtatcgggcgtttcggaattgtgggggataaaaaggttttgtagtttcggttgaggggttttatcgataaaagaaggggaagtcggtgagtagaggttgaagagggtggggaagtaggggagttgtgcgtgtgtcggggcgggtggaattttagcggattttgggaggaggtttttcggtcgaatttgttcgattttttttttttcggtttgttttgtagg

SEQ ID NO: 2156 - DNA, 5586 bp, Artificial Sequence
  chemically treated genomic DNA (Homo sapiens)
tttgtaaggtaagtcgggggagggagggtcgggtaggttcggtcggggagtttttttttagggttcgttaaggttttattcgtttcgatatacgtatagtttttttgtttttttattttttttagtttttgtttatcggttttttttttttttgtcggtgagattttttagtcgagattgtagagtttttttgttttttataatttcgggacgttcggtattcgatggggtgcgttttaagtattttaatgaggagttttaatggtcgtttcgttttttttttacgattgtgttttcggggttgtaaagtttgtttagaaagcgtatttaggttaagtttttaaattttaaggagagttttggtttcggtttttttcgtttattttcgcgtttatattttatattaggtatcgcggcgtacgtcgttcggagtttgttgggatatgaagtttcgtttttagggtcgtattattcgtcgggaagtggagtttgggtttatttttgtttcgtagagtttggaaatagtggcgggtcgggtcgttgcgttgtggtttttgggatttttaggttcgcggtttcggatatttttttttcgagatatttagggattggtttttttttttaggtcgattaggtaggaagcgtgttcgtagtgttttttggaaaatgtagttcgggggtattatttgtagattcggggtgggaggtcgtcgagtttttgtcggttttgttgttacgggtcggtcggtaagttatgaggaaaaagattaggttgtttgatttagaaaaaattaaaataaaataatatgagaaaaatagatatttttaaatattgttagagagtaaatgtgtttagtcgttttagttgggtattagtgtttgttaatatataaagatgtttattttgtgtgtagtattcgttttttattttcgttcgcgagatattttaatacgtgttaagagtagtttttgtttgtttgttttgagatacggtttttttttttcgtttaggttggaatgtagtggttcgatttgggtttattgtagtttcgattttacgggtttaagcgattttcgtgttttagtttttcgagtagttgtgattataggcgtgcgttattattttcgtttaattttgtgtgtatgtgtatatatataaatatatatatatataatatatatatatatatatatatatatatatatatatatatatatattttttttttttttttttttttttttttgtagagatagggatttttagttatttgggaggttgaggcgcggggaattttttgaatttgggaggcggaggttttagtgagttagaattttgttattgtattttagtttgggtaatagagtgagatttcgttttaaaaaaaagttttaagtagttgggattataggcgttcgttattatatttagaaaattttttgtattttaagtagagatggggttttattatgttggttagattggtttcgaatttttaattttaagtgatttgttcgttttagttttttaaagtgttaaaattataggcgtgaattattttattcggttaaagagtagttatttgtttatttgttttgagatagagtttcgttttgttatttaggttggagtgtagtggggtgatttcggtttattgtaatttttgttttttaggtttaagtgatttttttgttttagttttttaagtagtcgggattataggtgtttgttattatatttggttaatttttgtattttatttagtagagataggggtgttattatgttggttaggttggtttcgaatttttgattttaagtgatttttttatttcggtttttaaaagtgttgggattataggtgtgagttattgtgtttggtttgtattaataacgttttgaaattttgaaataatattaaatttttacggttatttatttatttgtttatttatttaaaaaaaatagatttttggtatttattatgggttaagttttagatattcggtatatagtagtaaataaaatagattaaatttttgttttattttatttttttatttttttggattttttttaaaatttataatttttttttaattatgagaaaatatttggtaaaatagagttgagggatattttataaaatatttgattagtatattttaatagtgttaagtttatgttaggtttatgtttgtaattataatattttgggaagttgaagtaggaggattgtttgaggttaggagtttaagattagttcgggtaatatagggagattcggattttataaaaataaaaaattgattaggtgtggtggtgtttatttgtagttttagttatttagaaggttgaggtaggaggattatgtgagtttaggaggttaagattgtagtgagttgttacgttagtgtattttagcgtgggtaatatagtgagatttcgttttagaaataaaaaataaaagaaattaaaagagttaaggttatgaaagataaggaaagatttataaattattgtagatgagagattaaggagatagaataattaaatgtaatgtggtgttttggattaaattttggaatagaaaaaggatattagtagaaaaattagtaaatagggtaattagttttttaagttggtttagaattgaggtaattcgggagtatgcgattttgagtttaatttaatttaattaattaattaatttatttatttatttatttatttttgagatagagtcgttttgtcgtttaggttggagagtaatggtacgattttggtttattgtaatttttgttttttaggtttaagtgatttttttgttttagtttttcgagtagttgggattataggtattcgttattatatacggttagtttttgtatttttagtagagatggggttttattatgttggttaggttggttttgaatatttggttttaggtgatttatttattttagttttttagaagtggtggtattataggttttagttattttgtgttttaaaaatagttaaagttaagtttagtggtttatatttgtaattttagggttttgatatgttaaggtaggaagattgtttgaggttaaaagttttagattagtttgagtaataaagtaagattttgtttttataaaaaaaaaaaaaattattttaaattagttaggtatagtggtgtgtattatgtagttttagttatttaggaagtttaggtaggagttcgaggttgtagtgagttgtgatcgtattattgtattttagtttgagtaatatagtgagattttgtttttaaaaataataataataaaaataaaagttagattgggtacggtggtttacgtttgtaattttagtattttgggaagtcgaggtgggcggattatttgaggttaggagtttgagattagtttggttaatatggtaaaatttcgtttttattaaaaatataaaaattagttaggtgtggtggtacgtgtttgtaattttagttatttaggaggttgaggtaggagaatcgtttgaattcgggaagtggaggttggagtgagttaagatcgcgttattgtattttagtttgggtgatagagcgagattttgttttaaataaaaaaaaaaaaattaaaaaataaaaggttttttgggagtaaaagttttgtaggtttgggtttaggattaatgggaggaaagaaattggagatagtgataatatagaagttttttgggatttttgtagtaaagggaaggaggaaaatgagagtgtattaaatagttagagaagaggggggttaaatagattattgttggttaataagagaattgcgggagcgatggttttggatagagagtgggaatgtatttttgagtggtaggtttggttttggttaggagtataggtagtttattcgtaaggattggaaagaaggtttattatttgggtatatgtggtgggtaattagatttttttagtgaaataggaagtttagtgggttattattttttttttagatgtttatcggattttttatttttataatattgtttaaacgttattttaaaaaggttgatatagatttgattattttattttaaattatattttttattcgaaatttttttatttattttttaattttgttttatattttttttttttttttgttttgtttttttgaaacggagttttattttgttatataggttggagtgtagtggttcgattttggtttatcgtaatttttgttttttaggtttaagtaatttttttgtttcggtttttttaggtgtattttaggtgtacgttattatatttggttaatttttgtgtttttttggagagatggggttttgttatgttggttaggttggttttaaatttttgattttaggtgattcgtttattttagtttttttaagtgttgggattataggtatgagttatcgcggttagttcgttttacgttttttttgttgttgttgttgttgtttgtttgtttgttttgttagtattaatattttttagacgggttttggaaggaggtattgttgacgtttgaggtcgggtaattttgtgattggggttgttttgtgtattgtaggatgacgagtagtatttgtggtttttatttattggatgttattagtttagttttcgtagtggggataattaaagatgtttttagatgttgttaaatgttttttgggatgttaaaatagttttagtttgagaattattattttaatatatgatatgattattttgtttttttgttttgagataggtttcgttttgttgtttaggttggtgtgtagtagtgtaattatggtttattgtagttttgattttttgggtttaaggtggtttttttattttagttttcgaagtgttgggattataggaatgagttattatgtttggtttgatttatttattgtttgttttttattattagaagataagttttataggataggaaatgtgtttgtcgtgtttattgatgtgttttttgggtttagaatagtgtttggtatataataggtgtttaataaatatttgttaaagaatatacgtatgtatgtaaagtagtagggtttttgtttgtttttatttttttattgtttttttatttttatttttattttttttgagatggagtttttttttgttttttaggttgtagtgtagtggtataattttagtttattgtaatttttatttttcggatttatgtgatttttttgttttagtttttcgagtatttggaattataggtgttcgttattatgttcggttaatttttgtatttttagtagagatagggttttgttatgttggttagggtggttttaaatttttgattttaggtgatttatttgtttcggttttttaaagtgttgggattataggtatgagttattgtatttggttaaagtagttatgattaatgattgatttggaatgtaggttgtgtgaggaggtatgtaaggataagagaagggtgatagatagtaaatgtgtagtaatattaatggattgtaggtttttgtggggttaatcgttaattcgagttggggtg

SEQ ID NO: 2157 - DNA, 7331 bp, Artificial Sequence
  chemically treated genomic DNA (Homo sapiens)
ggagttttgttttgttatttaggttggagtatagtggggtgatttttgtttattgtaattttcgttttttaggtttaagcgatttttttgttttagtttttcgagtagttgggattataggtatgtgttattacgtttagttaaattttgtatttttagtagagatagggtttcgttatgttggttaggttggtttcgaatttttgattttaggtgattcgtttattttggttttttaaagtgttgggattataggcgtgagttattgcgtttggttttatttagtattttatatatattgttatgttatttttttaataattgtggtattatttttattttatagatgaagaaattaaggtttagaggttatataagtagttagagtggggtcggatagttttgattttagtttcgatgtttttaatttttttatttttttttggaggataaggagatgtaggtttgtttgggaggtatttgttagggggtagtttttttttttttattttatttttttttcgttttattttagtattttgggatatgtttgtgggtagttttttttttagatgaaatttaggttcggagtttatattttttagttagaattacgcgtattattttttagggaagggtgggtgtttttgagtttattttattagcgggtttttggttaagtttttttgttttagagaggtagtttggtcgtttggtttatttgggtaggggagaataggaaagatcggttgttttttgttttttaaaagttttggttaattttatttttggaatttttggtgttatttttaggtttgttagagtaggggttgagaaaacgttgaattatgttggggagaagggatgtgggtgtgaagatgaaagttttgttaggaggtatattatagtggatttttgtttttggtattgtgttgttagttagcgacggtttagggtggtagatgttgtttaagaggaagttatagagaggtttgggtttaaattttttttttatttttagttgattatttatgaatttgttggataggtgtgtgttaggtattaggattaatttaataaattgaataaaacgggataaaaatatggtttaattttgcgagtagtttattatttagcgtgaaagtttggtagggaaggagtatatttttaaagacgtagtgggagtatagtaattatagttttatttttttttttgtttaaagaaatagttaggggaatgggtagaagtagtagagaggatatgggagttaggatacgaattgttagttttagttttttagttttttagtttttttttttttttttttttttttttttagatagggttttgttttgttgtttaggttggagtgtagtggtgtaatcgtggtttattgtagtttttatttttttaggtttaggtgatttttttattttaattttttgagtagttgggattataggttagtattattatatttagttaatttttgtattttttgtagagatggggttttgttatgttgtttaggttggttttaaatttttgggtttaagcggtttattcgttttggttttttaaattgttgagattataggtgtgagttattgtatttaattttttttttttttttaagggtaggggatagtatttttgttgggtgagttttttttttttgttagtgggattgtttttggtagtagtggggtttaagggtaggtagagagggttgggttggtttggtttgagggtttatttttttttaggtgataaaagtttttgttgttttgtaatagatattggggggcggggtatgggaatgaaggaggtatagggtatatttattttttttttaagatttagagtttaagggaggtgggggaatgattggcgatgaagagattagatggtaagggtttaaattaggggttatttttatttttttttagttcgtagtttttataatttttattttcgttttaggtttaggtttttgggtagggttgaaggttgttttttacgtagaggatttgtatttttagttagttttttcgggaagagtttagtgtatagtttatttatttattttattaatgtttgttgaattgttgttttgagtcgggttttgaatttaatgagtaaaattgaagatgagtaaaaatagttttggttttggtttttacggggtaagatgatagttttatcgggaagagggatagggtttagatggttatagatataggttaataagataattgtaagtagtaaagttagaaagtataaaaaaaggaaaaagggaaggtttttttgaggaagggagggtttgatttgtgattttatggaggagattttagttagtgttcgggaggaagaaacgttttagtgtgggagggagaggggtttgggagaaaatttttaaaggttagtggttggaggaggaagaggaggtagagttaggttgttataaagggtcggggttttggaagttatagggaagttgagtttttaatttgagtgaaaggcgattagtagaaggggtacgatttgcgggggtgagggaggtaggatttacgtgggagagtttagagtggaggttatcgtagagtttaggtaaatgatggtggtgttaattaaataagaaattagttttttgattaggtgtagtggtttacgtttgtaattttagtattttgggaggttaaggtgggtggattagttgaggttaggagtacgagacgagtttggataatatggagaagtttcgtttttacgagaaataaaaaaaaaaaaaaaaatagttaggtatggtggtgggtgtttgtagtttttattattttggaggttgaggtatgagaatcgtttgaatttaggaggtagaggttgtagtgagttgaggatgtattattgtattttagtttgggagatagtaagattttgttttaaaaaaaaagaaaaagaaaaaatttattttttggttaggtatagtggtttatgtttataattttagtattttgggaatttaaggtaggcggattagttaaggttaggagtttggttaatatggtgaaattttgtttttatttaaaaaaaaaaagtaaaaattagtttggtatgttggtatgtgtttgtaattttagttattcgagaggttgggttgggagaattttttgaattcgggaggtggaggttatagggagtcgaggttatattattgtattttagtttgggtaatagagttaaattttattttaaaaaaaaaaaaaaaattagttattgaaaaaattaaagttagttttattgagttttattgaggattgtattttgggagagggttttagagagtttttgttagattgcgttaaagtagtattttagtttatagtttagatatagaggtaggcggttttgtgtgtgtttagaagttatggttaggtacggtggtttacgttcgtaattttagtatttttggaggttgaggcgggtggattgtttgagtttaggagtttgagattagattgggtaaatacggtaaaattttttttttataaaaaatataaaaaaaaaaaaaaaaaaaaaaaattagttaggtatggcggtttttgtttgtagttttagttatttgggaggttgaggtggaaggattatttgagtttaagaggtgagttgtgatggtgttattgtattttagtttggatgatagagcgagattcggttttattaaaaaaagaagaagaaaaatttatattaaatgtttttagaagttatattagtgtaaatttcgttaaggtttgggttcgaggatgtatttagttatatagattatagaggtataatcgttaattttgttaggtgttattttatgtataggaaaaggtatagttaggattatttaatttatattttttaataatgtagtgatttaggtaagaggcgtgggagtttgtgttttgttttgtttgttatttttaaggtattttttcgttgggttgtttttagttattgagttagggttttgttagtttttgataagtagaaagagtaaatgcggttttttgggattgtaatttggttttatagtggtttaggttagggtgggagtagtgaacggagttataaaagaaattttttaggtagtatttacgggtgggtgttggattagatgtagggttaagggtaggggaggaagtttgggtaatggaaggttgcggggttaaggggggattgggaattttggagggttaggtttgggggagagttaggaggtcgtgaatttggatttggatgtttgttgaagttgatgtattttgaggatatttgtgggatatataggttgggttagggttgaaagaggtgttggttatggtcgggggtagggatttatgtttgtaattttaatagtttaggaggatgagataggaggaatgtttgaggttaaaatttcgaggtcggaagttttagacgagtttgggtaatatagtaagattttgtttttagaaaaggaaagaaagaatcgttggttgtggaagttagttatggtttagagtttagtagtgtaggagaggagggtgcgggtttgagagaggtagtaggtttggttggagaggtagaaggaaaattaaggtaggagagtgttttggaagttgggagaaggtagagggagatcgaggtttattttttggttgaggggtttagggtgagttattttgggaggtttgatttttttttttgtgaaatgggtaatatatttatttttgtttattttattttttttatttcgtcgacgtcgagtgaggagtagttgtgaggaggaggaagttttgtatagacgtgaggacggtttcgggcgtttttatttcggggatatttttttttttaggagatggaatttcgagggtacggcgtggcggtttatgcgggtagttcgcgttaggatttagcggtttcggggttggagggcgggcgttagtttcgtcgggggttcggagggggattcggagcgggttaaggggcggtttcggcgggcggattcggagcgggcggcggagtgattcggataggtaggcgcgggtttggcgtttgggggtttcggggggcggttaggggcgtcggcgggtttttcggcgcgggggcgagggtgttaggttttttgggttttcgattttggggtagtcgcggaggtttttgaatttcgcgtttttagagcggaggttaagggggtatttggaaagtttggggttgttttgtagagagaacgcgaattgggaagggcggggagttcgagtttggggggagttagaggtgaggtcgtcgggggatgggatattttttgttttttcggggaggttggaatgtggcgggtggggtggggggggggggttcggtgggaatggtcgagatagagacgtagagagataaagagagattagagacgggagcgcgagggcgcgcggagtaagttttcgcggttgattgtttttagttgtgcggcgttgtaatatttgggtttttttcgtcgggatttttttttttgagttcggttttggagtcggtagagtttttttttcgtttgatgtttgagcgagcgtcggggttttttgttttttattttttaggacgtaggggagtcgggggtgggggaggtcgtagttgtggaagaggttagaggtgggggtggggtagttttttaggtaggttttggtttttcgtacgttttaaaattttttcgtttagaagagttcggagatgtggtttcgtgggaggagtttatgaattttatattgattttttttttttttgttttttcgttagttcgtgggttttttttttttaataagtttgggttcgggggttagttttaggggaggaagatttttcgtagggtatcgataggtattttttaatattttgtaattttttttgttttaatttagcgttttttgttgagtagcgggggtttcgatcgatttgacggatggggagaagggtaaggaaggttttttgggtttttttattttttttttatgaggaggttaagggtttttagaatggggtgtggggagttagttatttttcgtttttggggtagtttggttttgagtttcgtttttcggtttttattttattttagtgaggtgtttaatgtatgagaggagttagggggttaggaggttttaggattgagaggaaggagggaaagattttttgttttttttttttttttttttttttttttggatttttagtggggaaaatagattaaagttggggtttttagttagttttttgaaaggattttttgggttgtagtcgggaggggtttttttggatggatttcgttttcgtagttttttttatagaaggttgacggatttgaggtggttttttattgagttggggttggatgtggggaatcggaggtttttttaagttttatcgtgtagttaggattggaggttgggtttttgaatgttaggagtttgatgaaagttacggattttatgttttttttttttaaatgatatatatatttgtttatagtgttagggggtgtagaatttttagtttgggtgatgttacggtttttttagtgttgtttttttgggatttagaggagtttttttaggttttattttcgtgttttttgttgttgtaaatagttcgggtttcgtgagtttgtgatgtatatagttaggttttgcgaggtttggaggtttggtaggagaggagttttttgggagttgggagttttgttcggtttggtcgttttgggggtcgggtaggtttatgtgtatgtggttttttgttgagtaggatgtttagggtttaggggttaattgggagtaggtggtggtttggtagaagttgttgagtttaggcggtgatgtcggttggttagggttggggttttaaggatgggtttgggtttagtgatttacgtagttagtgttttggatatttagggagttattgggttagagggttgagtacgggtgtgggtgaggatagaatggtttgggttgggagtatattaggaatgtttttttagtgagtagggtagggttcgtttttttttgattatattaagtatatttattatacggggtttgtttgttaggattagttttggagttgggttggaggttttgttttttgtgatttgaatatttgggtgggttagtagggattgggatgtttttttattttagtttttttatgtttggtttttattttgggtgttattttttttagggcgaaattaggggattaaaggtgagttttgttgttttgggtgtggttttgggtagagtttttttatcggtttttttttagt

SEQ ID NO: 2158 - DNA, 7331 bp, Artificial Sequence
  chemically treated genomic DNA (Homo sapiens)
gttggggaaagatcggtgggagagttttatttagggttatatttaggatagtagagtttatttttgattttttgatttcgttttggagaaggtggtatttagaatagaagttaggtatgggagggttggagtggagggatattttagtttttgttggtttatttaggtgtttaggttataagggataaggtttttaatttagttttagggttgattttgataagtaaatttcgtgtagtgggtgtatttgatgtggttagggaagggcggattttgttttgtttattaaggggatatttttaatgtgtttttagtttaggttattttgtttttatttatattcgtgtttagttttttggtttagtggttttttgggtgtttaaggtattgattgcgtgaattattgaatttaggtttatttttgggattttagttttggttagtcggtattatcgtttggatttagtagtttttgttaagttattatttgtttttaattagtttttgggttttaagtattttgtttagtaggaaattatatatatatgggtttgttcggtttttagagcggttaggtcgggtagggtttttagtttttagaagattttttttttgttaggtttttaggtttcgtaagatttggttgtgtgtattataggtttacgagattcgggttatttgtagtagtaggaagtacgagagtgaagtttgagggggtttttttggattttagaaaggtagtattgaaggggtcgtgatattatttaggttgggggttttgtattttttgatattgtaggtaagtgtgtgtgttatttggagggagagggtatggggttcgtggtttttattaggtttttgatatttaagagtttagtttttagttttggttatacggtgggatttgggggagttttcggttttttatatttagttttagtttagtggagggttattttaggttcgttagttttttgtagggagggttgcgagggcggggtttatttaggagggtttttttcggttgtaatttaggaagtttttttagagagttagttggaaattttaattttggtttattttttttattgggagtttagggagaggggagggaaaggggagaaagtaggaggtttttttttttttttttttaattttgaggttttttgattttttggttttttttatgtattaggtattttattaaggtggagtgggagtcgggagacgaagtttaggattaagttgttttagaggcgagggatagttggttttttatattttattttgaaaatttttgatttttttatgggagggggatgaaaagatttagagagttttttttgtttttttttttattcgttaggtcggtcggagttttcgttgtttagtagaaggcgttgaattggggtaagaggggttgtaaggtgttgggggatgtttgtcggtattttgcggggagttttttttttttaggattggttttcgaatttaggtttattgggggaaggaggtttacgggttagcggggaggtaggaaagagagaagttagtgtggagtttatgaattttttttacgggattatattttcgagtttttttagacgaaggggttttggggcgtgcgggaggttaggatttgtttgggaggttgttttatttttatttttggttttttttatagttgcggttttttttattttcgatttttttgcgttttgggaggtgggggatagggggtttcgacgttcgtttagatattagacggagggagggttttgtcggttttagagtcgggtttagggggaggggtttcggcgggagaaatttagatgttgtagcgtcgtatagttgggaataattagtcgcggaaatttgtttcgcgcgttttcgcgttttcgtttttgatttttttttgtttttttgcgtttttgtttcggttatttttatcggattttttttttttattttattcgttatattttaattttttcgggagaataaaagatgttttatttttcgacgattttatttttggttttttttaaattcgggtttttcgttttttttaattcgcgttttttttgtagagtaattttaaattttttaggtgtttttttggttttcgttttgaaggcgcggggtttaggaattttcgcggttgttttaggatcgaggatttagagagtttggtattttcgttttcgcgtcgggggattcgtcgacgtttttgatcgtttttcggggtttttaagcgttaggttcgcgtttatttgttcgggttatttcgtcgttcgtttcgagttcgttcgtcggagtcgttttttggttcgtttcgagttttttttcgggttttcgacggggttggcgttcgttttttagtttcggagtcgttgggttttaacgcgagttgttcgtatgggtcgttacgtcgtgttttcggggttttattttttgggggggggggtgttttcggggtagaggcgttcggggtcgtttttacgtttgtgtaaagtttttttttttttatagttgttttttattcgacgtcgacggggtgaggggggtgaggtgggtaagggtaggtgtgttgtttattttatagaggaggaaattaagttttttaaagtgatttattttaggttttttagttagaaagtaagtttcgatttttttttgtttttttttagtttttaggatatttttttgttttggttttttttttgtttttttagttaagtttgttgttttttttaggttcgtattttttttttttatattgttgagttttgggttatggttggtttttataattagcggttttttttttttttttttagagatagggttttgttgtgttgtttaggttcgtttggaattttcggtttcgaaattttggttttaagtattttttttgttttatttttttgggttgttgggattataggtatgagtttttgttttcggttataattagtattttttttagttttgatttagtttatgtgttttataaatgtttttaagatgtattagttttaataagtatttaagtttaaatttacgattttttaatttttttttagatttggttttttaggatttttagtttttttttggtttcgtagttttttattatttaggtttttttttttgtttttagttttgtatttaatttagtatttattcgtgaatgttatttgaaaaattttttttgtgatttcgtttattgtttttattttggtttaagttattgtgagattaagttgtaattttaagaaatcgtatttgttttttttgtttgttagaagttgataaagttttgatttagtgattgggggtagtttaacggaaggatgttttgaagatggtaggtagggtagaatataggtttttacgttttttgtttgaattattgtattgttagaaaatataagttaaatgattttggttgtgtttttttttgtatataagatagtatttgataggattgacgattatgtttttataatttatataattaggtgtattttcgaatttaaattttggcgagatttgtattagtgtagtttttgaagatatttgatgtaaatttttttttttttttttttaatgagatcgggtttcgttttgttatttaggttggagtgtagtggtattattatagtttattttttgggtttaagtgatttttttattttagttttttaagtagttgggattataggtaagagtcgttatgtttggttaattttttttttttttttttttttttgtattttttgtagagaaggggttttgtcgtgtttgtttagtttggttttaaatttttgagtttaagtaatttattcgttttagtttttaaaagtgttgggattacggacgtgagttatcgtgtttgattatagtttttgagtatatatagaatcgtttgtttttgtatttaaattgtgggttgaaatgttgttttggcgtagtttaatagaaattttttgaaatttttttttagggtgtagtttttagtaagatttaataaaattaattttaatttttttaatggttgattttttttttttttttgaaatggagtttaattttgttgtttaggttggagtgtagtggtgtgatttcggttttttgtaatttttatttttcgggtttaagaggtttttttaatttagtttttcgggtagttgggattataggtatatgttagtatgttaggttaatttttgttttttttttttgagtagagatagggttttattatgttggttaggtttttgattttagttgattcgtttgttttgggtttttaaagtgttgggattataggtatgagttattgtgtttggttaaaaggtggattttttttttttttttttttttgagatagggttttgttattttttaggttggagtgtagtggtgtatttttaatttattgtaatttttgttttttgggtttaagcgatttttatgttttagtttttagagtagtggggattataggtatttattattatgtttggttatttttttttttttttttatttttcgtagagacgaggtttttttatgttgtttaggttcgtttcgtatttttgattttagttgatttatttattttggttttttaaagtgttggaattataggcgtgagttattgtatttggttaaaaggttgattttttatttagttgatattattattatttgtttgggttttgcgatagtttttattttgggtttttttacgtgggttttgttttttttattttcgtagatcgtgttttttttattgatcgttttttatttaggttagaggtttaatttttttgtggtttttagggtttcggttttttatggtagtttggttttgtttttttttttttttttagttattggtttttgggggtttttttttaaattttttttttttttatattgaggcgtttttttttttcgagtattggttgaggttttttttatggggttatagattaaatttttttttttttagaggggtttttttttttttttttttttgtgttttttagttttattgtttgtagttgttttgttggtttatgtttgtgattatttgagttttgttttttttttcgatgagattgttattttgtttcgtgaaggttaggattaaggttgtttttgtttatttttagttttgtttattaagtttagagttcggtttagagtagtagtttagtaaatattggtggaatgaatgagtgaattgtatattaaatttttttcggagaagttggttgggggtgtagattttttgcgtgaggggtagtttttagttttgtttaggagtttaggtttgaggcgggagtgagagttgtaggggttgcgggttgggaggagatgaggatggtttttgatttagatttttgttatttgatttttttatcgttagttatttttttattttttttagattttgagttttagggagggagtaaatatgttttgtgttttttttatttttatgtttcgttttttagtgtttattgtagggtagtagagatttttgttatttggagagaggtgggtttttaggttaggttagtttagttttttttgtttgtttttagattttattgttgttaggagtaattttattggtaaaagagaggaatttatttagtagaaatgttgttttttatttttgaaaaaaggagggaggttgggtgtagtggtttatatttgtaattttagtagtttaggagattaaggcgggtggatcgtttgagtttaggggtttgagattagtttggatagtatggtaaaattttatttttataaaaaatataaaaattagttgggtgtggtggtgttggtttatagttttagttatttaggaggttgaggtaggaggattatttgagtttggggaggtagaggttgtagtgagttacgattgtattattgtattttagtttgggtaatagagtaagattttgtttgaaaaaaaaaaaagaaaagaaaagaaaaattgggaaattgaggggttaaagttgataattcgtgttttggtttttatgttttttttgttgtttttatttatttttttggttgtttttttgggtaggggaggggatggggttgtggttgttgtgtttttattacgtttttggagatgtgttttttttttgttaggtttttacgttggatggtgaattgttcgtagggttagattatgtttttgtttcgttttatttagtttgttgagttagttttggtgtttggtatatatttgtttaatagatttatgaataattagttaagggtagaggagggatttgaatttaggtttttttgtggtttttttttaaatagtatttattattttgaatcgtcgttggttggtaatatagtgttaggagtagaggtttattgtgatgtgttttttggtaggatttttatttttatatttatattttttttttttagtatgatttaacgtttttttagtttttattttggtaggtttggggatagtattaggggttttaggaatgaggttggttagggtttttggaaggtaggaaatagtcggttttttttgtttttttttgtttagatgagttagacggttaagttgtttttttagagtagaggggtttggttaggggttcgttggtgagatgagtttagaggtatttatttttttttgagggatgatgcgcgtggttttggttgggagatgtgggtttcgagtttggattttatttgaggaaggaattgtttataaatatgttttaggatgttggggtgggacggggagggggtaaggtgggagagagggagttgttttttagtaaatgttttttaggtaagtttatatttttttgttttttaaaggagggtaggagggttaggaatatcgaagttggagttaaagttattcggttttattttgattatttgtgtaatttttaagttttggtttttttatttgtaaaatgggaatagtattatagttgttggaaggatgatatgataatgtgtgtaaaatgttaaatggggttaagcgtagtggtttacgtttgtaattttagtattttgggaggttaaggtgggcggattatttgaggttaggagttcgagattagtttggttaatatgacgaaattttgtttttattaaaaatataaaatttagttgggcgtggtggtatatgtttgtaattttagttattcgggaggttgaggtaggagaatcgtttgaatttgggaagcggaggttgtagtgagtagagattattttattgtattttagtttgggtgatagagtaagatttt

SEQ ID NO: 2159 - DNA, 11944 bp, Artificial Sequence
  chemically treated genomic DNA (Homo sapiens)
ttttgtatttttagtagagatagggttttattatgttggttaggttgattttgaatttttgattttaggttatttgtttgttatagttttttaaagttttgggattataggtatgagttattgtgtttagtttttttaattttttaaaaaaggttaaaagtatgttgggtatatttttttatagtaatatttaaaattgtttttattttttttaatgataatatagaattttattgtgtagttgttttttgggagacgattgaaattttttttatttttattgtggtagtggagatgtgggtgtgtataatagttaaaatttaataagttgaatattttaaatagatgtagtttattgtatgtaaagtatgttttaataagatgatttaaaaatattattttttttgagatttgtattttgtttatgtgaaataaaataaaataaaaattttgtttttgtgtttaggagatatattttgatttatttggaggtagagggttatgttgtttgtaatttatttttataggttttgaaataataataatagtagtatatttatagatttagagagagagaaatttgtggtaaaaatgtttataagtaaaattagataaagggtaaaaataaaagaaataatgaaattacgttttttaaattttttgttttcggtcgggtgcggtggtttacgtttgtaattttagtattttgagaggtcgaggtaggtagattacgaggttaggagatcgagattattttggttaatatagtgaaatttcgtttttattaaaaatataaaaaattagtcgggcgtggtggtaggagtttgtagttttagttattttagaggttgaggtagtagaatgttttgaattcgggaggcggagtttgtagtgagttaagatcgcgttattgtattttagtttgggcgatagagtaagatttcgttttaaaaaaaaaaaaataaaaatttttttttattttttttttttttttttatttttatttttttttttatttttttaatacgtttttttattttttttttttttttttattttttgtatttgattttcggtatattttagtttttaggttaataaattttttcgcgttcgtcgggagtaggttagggaagggacgcgaggcggcgttgttatcgtattttgagcgtcgtagttttttgggttttttgtattattttagtgaaggttattttagttttttatggaggttaaattaagggtgtaaattaggatttttattgaagtggcgggattttaagaggtttttttttggttttttagttgtgggtttttttgcgggcggcgtagtcggtttttattagaatcgtttagaggcggacgttgtttttttggggtgacggagtagtaggaagcgttttcggattttggaatacgtgggcggttcgtgggaggggttgaggcgtagttttttatttattcggattagaatttttcgcggtgttgttttaagagagtcggattttagatcgcgttttagttcggattcggaatttttgttttgcgggtttgtatttttataacgggtaggtgtgagtgttttgtagttggagattagaagtttgaaggtagttcggttttttttagtttatagcgtcgttatttcgtttttatattagtaaatatattttatttttcgtagattagggcggggtgacgggtgattttagttttcgtagtgaatttcgggtagtaaaatttaaaatatatgcgggtaaggtcgggtacggtggtttacgtttgtaattttagtattttgggaggtcgaggcgggcgattatttgaggtcgggagttcgagattaatttgattaatatggggaaatttcgtttttattaaaaatataaaattagacgggtttggtggtgaatgtttgtaattttagttagtcgggaggttgaggtaggagaatcgtttaaattttggaggcggaggttgcggtgagtcgagatcgcgttattgtattttagtttgggtaataagagggaaaatttcgtcgtaaaaattttcgggggcggagcggagtttcgttttgggttatgtaagcgatcgcgttgggtcgtttttttttttttttcggattttgtagtggcgtttaaagtttgagagagggaagtcgtttttgtgttggtgagtgtatggggtataaggtaagtgttgagggagaaaacgtagttaatggggtagagtagacggggttggaggtggggtggagggggagagttttggatagaagatttgggaggtttggtgggggaggggcgtttaggtttgggtattaagaaataatttttttggagtttaagattatttcggttttttttagtttaagagaggattggttttatgattttttgaaattatttttaaatgttttagaataaattttgtatatttattattgttattgaattattaaaagttttttttgggggcgagttgaattagattttttgttggagttggtatacggaggaagttttggagggagggtagatatcgtggaggtaagggtttgggatttgtgttaggagagttaggtttattttttttttagttttttattaggtttatgatttttagtagtgaaaataatttttttaaggtggggaaaggatttcggtttttgttgtgtttaataaattatgaggattaaaataaattattagtgaatgtgaatgggaaaattaagaaattgttaaaattttcgaatatattatatttttatttatagaaaagtgtaggttagggattatgggggaatagttagtaatgatagggatagttgaatttaaaaaaaaagtttgtgaggttgataaagaagaaacggatatattttttgattttggagggtttatagggtagaagatggtagatgatagttgggtgtggtggtattcgtttgtagttttagttatttaagaggttgtggtgggaggattgtttgagtttaggtatttaaggttgtagtgagttataattatgttattgtattttaattgagtgatatagtaagattttttttttaaaaaaaaaaaaaatttatggtagggtataatgagtattattaggaaggtttaaattacgggttaaattagtagttttaaaatttgattatatatcggaattatttagggaattttaaaagatattaagatttaggtttaatttgggtttattgatttaataatttaggttgtggttgtggtttgggaatatggatattaaaaattttttaggtggttttacgtagtggttaggtttgatgatttttgtttagatgttttaacgattaagagatgtgcgttggggataaggtaatttttttagtagaaagaggttttcgggatagtatttttattattgagaattgagaatttatatgttatataatttatttttttaaagtgtgtagtttagtggtttttagcgtaattataaggttgtgttatcgttattattgtttattttggaagatttttttttttttttttttttttttttttttttttattttaaaggttagttaagtgaaatagtgggagtgaagaagaaataaagatatttataattggttgtgattaattagttgtatatattgtatttagattagtttgggaagattttaaggatatggtgtggtttgatgggttttaaggtagaggttataatagtttggaagagggagattgtttaggtagtggtattttggtgggatagggtgaggagattttagagtttacgtttattgtaattttggggagatgttattagagaaatgggggtggtgttagatagtagattgtggtagttgaggttttttacggtagagtagaagtatttattatgtgtgatatttagtagatggggcgttgtgggtggtttggagtattttggttgtaattgaggtaggtatcgtgtttaggaaggttgtgtagtaatttaggttgaagggaggggaaagtttagattaagattgtggttgtgggattgaaatagcgttgaaggagttgattttgattttcggagatgatggggaaagaggaaattagaagggattaaggatggtgatgtttttaagagaaattgaggaggaagagaggatgatatggtggtagacgtatagagagtttttgtagattttttatattggaggggattatggtcggaggtatagatgttttaaggtaggttggaaaagggagtttggagagagtttggtgttgtagtgaattatagggagtcgtttttttggttttgtgattatttagggattgaatagagaggcggttttgggagattttagatatttagaggatataagggggtgaaaggggggtttggttttgagttaaagggaggagaaggagattataaagttgaaacgtttaagagagtttgtggtttgagcggttttattgcggtaggtgtttttgagaggtagaggtggttgagatttggaaataggtttgtaaatttggttattggttttattgttagtaacgttgtgcgcggttgagggagtgtgttgggagaatagttacgcgttgtttgttttggaaggaataagttagtgagagtcggtttaatggggcggtcggcgaaaggggtttggtgaggttcgcgtttttcggggtgggggcgcggggatgggtggtcgcgatgtcgggagggtaggtagggttttggtcgtgtttatgaagttggagttgtatttttagttattcgaagttggtttttgttttaggttgcgttttcgcgtgttttttattttttgggttttaggtttcgttttttaaatttttttaggtttttagtttattggaatttttttttttaagcgtggtttcgtttttttcgttcgtgattggttttaagtttcgggttttagttttattggatgagcggtcgggggatcgggttaggtgattaagttttcgcggcgtttttttttcggttattgtttgagtcgttgagagggtggcgacgtcggggttatggggttgggttcggtttttttgtttttggttggtatttttttttttgtattttcgggagttgttgttggtgagtggcgtttttggcggttttcggcggagcgggagtagcgggacgttttcgggggtcgggtgggtagcggcgagcgttgtgcggttagggcggggtttttgtgttttgtcggtggcgtagggagttggacgcggttcgttatcgttatattttagttttgttttttcgttattttttagtttttttcgggatcgcgtattatttgtattttttggtttttttttgtttttttttttttcgcgtttttttcgtttttttttatttttcggataaattagtttttttgaggtttatgggttttcgggttgttttcggggttgtttttgtgaatggtattcgagtgtttttttagcgcggttattgaagtagttataattttcggtgttcggggcggtttttaggtttttgaagttttgttttttttcggagtcgacgtgtttttagtttttgggtcgtagtttttggagtaggggtttttttttttcgggattcggagttggtgttttttgttgttgtggggattgtggggggttttgatttttaagttgaggggttggagtttgtaggtttcgggtagaggattttttttgcgattttttttatttttagtttatttttttttcgtttttggtttcgagggttttttttttttttttattttatttttattaatgattagtgatttaaggatattagatttttttttattttttttttgtttattttagggttcgttgagtttttttgtttttttagttttttgttatttttttttgtgtgttgttttttgatttatttttagggtgttttttgtttttattttttgttttcgttatcgaaggttttttttgtattttttatgggttttttttataagtagtttttatttagtgttgtttttatgttttttcgtttttaaatgtttttgattttaattttttggtgttgttttttattcgggggggttttttttttattttatttttttttagatttttaaggggaattttgatgttaatggtagttgggttttaggtagggcgtagggtagcgtagatgtttttttttttttagtgtagatgtttgttttggattttgttttattgtggttttttttttatttttttatttttagttttatttttttgaggattttattttttagtttataggtgttggattatttttttttggttttttcgtttttttttattttgggattttgtgttgtttttattttttgtttagttgttttgggtttttagtacgtttttattttttagtgggaaagtgggagtgttggagtatatgatagtgttgagtattttttttaagttttatttttttttagagtattttttttttttgtttttattttattttaagtttttttatagttatttttgttttatgtttatgtcgttttttagtttttgttttgtttattttttttttttaatttagatttaaaataggttgttgggttaattgttttttgattttttttttttttttttggttttttgattttagtgggtttttattttttatatcgtatatttaaaatttgttttgtttgtttttggggtgttattgttttttttttagtattattttttttggtaggtttttttttaggttgagaatttttttttttattttggttttttttttttggttagtatttttattttttgttttgtttttaatttttaatttttgtttgggtacgtagtagatatatatgtatatatttatggggtatatgggatatttttatataggtttataatatgtaataattatattagggtaaatgggttatattataataagtatttattttttttttgtgttataaataattttattatgtttttttagttatttttaaatgtataataaattattgttgattgtatttattttgttgtgttatttattagattttatttattttaattatatttttgtatttattattaattatttttgtttttttattttttattattttttttagtttttggtaattattattttattgtttttttttatgaggtttattgttttaaattttggttgttataaataagtgagaatatgtaaagtttgtttgtttgggtttggggtttattttattttataggatgatttttagttttttgtaaatgatacgatggttgaatagttttttatatatatatgtatattatattttttttatttatgcgtttgttgatggatatttagattgtttgtagattttggttattttgaatagtgttgtaataaatatggaaaagtagatagttttttaatatattaattttttttttttggagtatatgtttaatagtgggagtgttggagtatatgatagttttattgtatttttagtttttggaagaatttttatattgttttttatagtggttgtattagtttacgtttttattaatagtgtatatttttattagtattttttatttttatattttcgttagtattttttattgtttgttttttggataaaagttagtttatttggggtgggatgttatttcgtaggagttttgatttgtttttatttgttgacgaatgatgttgagtatttttttatatatttgtttgttatttatatgtttttttttgagaaatgattatttagatttttttttatttttaaattggattattagattttttttttttatagttgttcgagttttttatatgttttagttattgattttttgttagatgaatagtttgaaaatttttttttttatttttggatggtttttttattttgtttattgttttttttgttgtgtagaagtttttttatttgatatgattttatttatgtaattttattttggttatttgtgtttgtggggtattattttaaaaatttttgtttagtttaatattttagagagtttttttaatgtttttttgtatagttttatagtttgaggttatagatttatatttttaatttattttgatttgatttttgtatatggtgaaagatagggtttagttttatttttttgtataaggatatttagtttttttagtattatttttgaagagatttttttttgttaatgtgtgtttttggtatttttgttggaaatgagtttattgtagatgtatggaattgtttttgggttttttattttgttttattgttttgtgtgtttgtttttatgttagtattatgttgttttggttattgtagttttgtagtataatttgaagttagataatgtgatttttttagttttgtttattttgtttaggatagttttatttattttggtttttttgtggttttatatgtattttaggattatttttattatttttgtgaagaatgttattagtgttttgatagggattgtattgaatttgtagattattttgggtagtatggatattttaataaaattgatttttttaatttatgaacgtggattattttttttattttttgtgttttttaattttttgtattagtgttttttgtttttggtttttgagatggagttttatttttgttgtttaggttagaatgtaagggtgtgattttggtttatcgtaattttcgttttttaggtttaagtaatttttttgttttagttttttaagtagttgggattataggtatgtgttattgtgtttggttaattttttatttttattagagatggggtttttttatgttggttaggttagttttgaatttttgattttaggtgatttatttgtttcggttttttaaagtgttgggattataggtatgagttattacgtttagttatattattgttttatagttttattggagaggttttttatttttttagttaggtttattttttagtattttattttatttgtagttattgtaaatgggattcgttttttgattttttttttagattatttgttgttagtattgatttttgtatgttgattttgtattttgtaattttattgaatttgttttttagttttaatggttttttggtggagtttttaggtttttttaaatattagattatatgatttgtaaataaggataatttgatttttttttttttagttttaatgtttttttttttttttttttgtttgattgttttagttaggatttgtagtattgtgttgtataattgtggtaaaattagttatttttgttttattttagattttagagaaaaggtttttagtttttttttatttagtatgttattagttgtgagtttgttatatatggtttttattatattgaggtttgttttttgtatatttagttttttgagagtttttattatgaagggatgttgaatttattaaatgtttttttagtattaattgaatgatattggtttttgttttttattttgttgatatgacgtattatattgattgatttgtgtatgttaaattatttttgtatatttggaatatattttatttgtttataaagaatgattttttttaatgtattgttgaatgtggtttgttagtatttttttgacgatttttgtatcggtgtttattagggatataggtttgtagtttttttttttatgatgtgtttttgtttggtttttgtattaggatatttttggttttgtaaaatgagtttggaagtattttttttttttttattttttagaatagtttgaataggattgatatatgtcgttttttaaaagtttaattgtggtaaattatatattatataaattttattgttttaattatttttaagtgtatattcggtggtattagatatatttatatttttgtgtaatttaaaattttgtgtttattaatcggtaattttttatttttttttatttttggtttttggtaattattattttattttttgtttttatgaatttgattattttaggtattttatttaagtagaattatgtaatgtttgtttttttgtttttggtttattttatttataatatttttgaggttcggtgggtatagtggtttacgtttggatttttagtattttgggaggttgaagtaggtggattatttgagtttcggagttcgaaattagtttggttaatatggtgaaattttatttttattaaaaataataaaagttagtcgggcgtgatggcgggtgtttgtaattttaattatttgggaggttgaggtaggagaatcgtttgaattcgggaagtggaggttgtagtgagttgagattaggttattgtattttagtttgggtaataagagtgaaattttatttttaaaaaaaaaataaaataataataataataatatttttgaggtttatttaagttgtagtatgggttagaattttattttttttaaggatggataatatttattatatgtatgtattatattttggttatttattttttagataacggatatttgggttatttttattttttggatattggtaaatattttattttttttgggtatatatttattttttttgggtattttttttgggtatatatttagaaatagaagtagtatataggggttttattttttttgtttttttgttaattttgttttgtgtgtgtgtgtatgtgtgtgtgtaggtgtgtgataatagttattttgattggttttaggtggtattttattgtggtttggatttatatttttttaatgagtgttgatattgagtatttttttatgtgtttgttgattatttgtaattttttttgaagaattggttatttaagttttttgtttatttttttttttatatagttttttttattagatatatgatttgtaatatttattttatttcggggttgattgtttttttattttgattgtgttttttgatgtatagatgttttgaatttttattagtttattttgttagttttttttattttatttgtgttttggtgttatatttatgaaagtattgttaaattttatgttatgaatattatttttaatgtttgtttttaagaaatttttaggttttagtttttgagtgtagagtttaggtttttgatttattttgagttaatttttgtatatagtgtaaattaagggtttaattttattttaatattttttgtttttagaattatttgttgaaaagattaattgattttttgttatttgtttattttagtggatattagttgttttatttaattgttgttttggggttttgttatgttatttttttattttgaatttaagtttatattattgtttttttttgggatattgattttattataaatttttttggggttataatttttttattttttgtgttttatgattatttttttttttgttttcgttatgtttatgatgagttttttttcgaggtagttttttttgtttttattttatttttatttatgtattatagttatattggatatgggtttttttgagtttgagtttttttttatttttattattttttttggtaagattttttttttattatttttatgttttttttttgtttttgtagggtagtttttttttttggtttttatttttttagggggtttgtggttatttagtttttgtatttggtttataagtttgttatttttattttttttttttttgtttattagtttttttttttatttttttatttttatagttttttttgtatatgaaattttcgtttttgtttttttgttcgtgtgtattttttgttttaggaaggttgggatagtagatttgtgtgttaaatattaatgtgaagttatttttaggaagaagttttatttatgatttttttttttttaga

SEQ ID NO: 2160 - DNA, 11944 bp, Artificial Sequence
  chemically treated genomic DNA (Homo sapiens)
tttggggaagaggaaattataggtgaaatttttttttggaagtaattttatattgatgtttaatatataggtttgttgttttaatttttttgaggtaggaaatgtatacgggtaaagggataagaacgaggattttatatataaagaaaattgtgagggtgggaggatagaggagggggttgatgaatagaagaagggggaatgaagatggtaaatttgtaggttaggtgtaaggattgggtggttataagttttttaagggaataggggttaaggggagaggttgttttgtaggggtaagggaggagtatgaaggtggtggaaggaaggttttgttagaggggatggtgggaatgggaagggatttaggtttagagggatttatgtttagtgtggttgtggtgtataggtgagggtgagatggaggtaaggggagttgtttcgagaagagatttattatgggtatggcggggataagggagggggtggttatgaggtataaagggtaggaaggttgtagttttagagaagtttatagtggggttagtattttagaggggagtaatgatgtgggtttgggtttaaagtggaagagtggtatgataaggttttaggatagtaattggatggaatagttagtgtttattggggtgagtaggtgataaagagttagttgatttttttagtaaatagttttgggggtagggggtgttaaaataaaattggatttttaatttgtattatatataaaaattaatttaaaatgaattaaagatttaaattttatatttaagaattaaaatttaaaaattttttagaagtaaatattggggataatgtttatgatataggatttgatagtgtttttatggatatgatattaaagtatagatagaatagaaagaattgataaagtagattgatgaaaatttaaaatatttatgtattaaagggtataattagagtgaaaaagtaattaatttcgaaatgaaataaatattgtaagttatatatttgataagagaagttatgtgggggaaaaaatgggtaaaagatttaaatggttaattttttaaagaaaattataaatgattaataaatatatgaaaagatgtttaatattagtatttattaggaaaatgtaaatttaaattataatgagatgttatttgaaattaattaggatggttgttattatatatttatatatatatatatatatatatatagagtaaggttggtaaagagatagagaaaatgaagtttttgtgtattgtttttatttttggatatatatttaaaagaaatatttaaaggaaataaatatatatttaaaggaaatgaaatatttgttaatatttaaaaggtagaagtaatttaagtgttcgttgtttgagggatggataattaagatgtggtatatatatataatgagtattatttatttttaaaaggaatgaaattttgatttatattataatttggatgaattttaaaaatattattattattattgttttattttttttttggagatggaattttatttttgttgtttaggttggagtgtagtggtttgattttagtttattgtaatttttatttttcggatttaagcgatttttttgttttagttttttaagtagttgggattataggtattcgttattacgttcggttaatttttattatttttagtagagatggggttttattatgttggttaggttggtttcgaatttcgaaatttaggtgatttatttgttttaattttttaaagtgttggaaatttaggcgtgagttattgtgtttatcgaattttaaaaatattataagtgaaataagttagaaataaaaagataaatattatatgattttgtttaaatgaggtatttagagtggttaaatttatagaaataaaaagtagaatggtggttattaggggttagaggtagggaggaatggggagttatcgattaatgggtatagagttttgggttgtataaaaatgtgaatgtatttaatgttatcgagtatatatttaaaagtggttaaaatagtaaaatttatgtaatgtataatttattataattaaatttttaaagaacgatatatgttagttttatttaaattgttttgaaaaatagaggaggagggaatatttttaaatttattttataaagttaggaatattttgatataaaaattaggtaaagatatattataaaaaagaaaattataggtttatatttttgatgaatatcgatgtaaaaatcgttaaggaaatattagtaaattatatttaataatatattaaaaaagattattttttatgagtaagtggaatgtattttaggtatgtaaggatgatttaatatatataaattaattaatgtaatacgttatattaatagaataaaggataaaagttagtattatttaattgatattgaaaaagtatttgataaatttaatatttttttatgataaaaatttttaaaaaattaagtatataaggaatagattttaatataataaaagttatatatgataaatttatagttagtaatatattgaatgggggaaaattgaaagttttttttttaagatttggaataagataaggatgattaattttattatagttatgtaatatagtattgtagattttaattagagtaattagataggagaaagaaagaaagggtattaaaattggaaaagaagaagttaaattatttttgtttgtagattatgtggtttgatatttggaaaaatttaaagattttattaaaaaattattagaattgaagaataaatttagtaaagttgtaggatataaaattaatatgtaaaaattagtgttaatagtaaataatttgaaaaagaaattaagaaacgaattttatttataatagttataaataaaataaaatattgaggaataaatttaattgaagaagtgaaagatttttttaataaaattataaaatagtgatgtggttgggcgtggtggtttatgtttgtaattttagtattttgggaggtcgaggtaggtggattatttgaggttaggagtttaagattagtttggttaatatagagaaattttatttttaataaaaatagaaaattagttaggtatagtggtatatgtttgtaattttagttatttgggaggttgaggtagaagaattgtttgaatttgggaggcggaggttgcggtgagttaagattatatttttgtattttagtttgggtaataagagtgaaattttattttaaaaattaaaaataaaaaatattgatgtaaaaaattgaaggatataaaaaatggaaaagatagtttacgtttatggattggaagaattagttttgttgaaatatttatattatttaaagtaatttatagatttaatgtaatttttattaaaatattaatgatattttttatagaaataataaaaataattttaaaatgtatatggaattataaaaaaattagaatagataaagttattttgagtaaaatgaataaaattagaggaattatattatttgattttaaattatattatagagttatagtaattaaaatagtatgatattggtataaaaatagatatatagagtaatgaaatagaatagagaatttagaaataattttatatatttatagtaaatttatttttaataaaggtattaagaatatatattggtaaaggagagtttttttaaaaatggtgttggggaaattagatatttttatgtagaagaatgaaattagattttgttttttattatatataaaaattaaattaaagtggattaaagatgtaaatttatgattttaaattatgaaattatataagaaaatattggggaaattttttaggatattggattgggtaaagatttttaaagtaatattttataagtataggtaattaaagtaaaattgtataaatgggattatattaagtaaaaaggtttttgtatagtaaaggaaataataaataaaatgaagagattatttaagaatgggagaaaagatttttaaattatttatttgataaaggattagtaattgaaatatataaggagttcgaataattataggaaaaaaaaatttaataatttaatttaaaaatgagaaaagatttgaatagttattttttaaaagaagatatataaatggtaaataggtatatgaaaaggtgtttaatattattcgttaatagatgaaggtaaattaaaatttttacgagataatattttattttagataaattggtttttatttagaagataggtaataaggaatgttggcgaggatgtagaaataaggaatgttggtgaggatgtatattgttggtgggaacgtaaattagtataattattatgggaaataatgtggaggtttttttaaaaattaaaaatataatagagttgttatatgttttagtatttttattgttaggtatatattttaaagaaaggaaattggtatattaaagagttatttatttttttatgtttattgtagtattatttaaagtagttaagatttgtaagtaatttaagtgtttattaatagacgtatggataaagaaaatgtggtgtatatgtgtatgtggagaattatttagttatcgtgttatttgtaaagaattggaggttattttgtgaagtgaaataagttttaggtttagatagataaattttgtatgtttttatttatttgtggtagttaaaatttaaaataatggattttatggggagagataatagaatgatgattattagaggttgagaagggtagtggggagtgggggagtagggatggttaataatgggtataaaaatataattagaatgaataagatttagtagatagtatagtagggtgagtatagttaataataatttattgtatatttaaaaataattgaaagagtataatgggattgtttgtagtataaagaaaggataaatgtttgttgtgatataatttatttattttgatgtgattattatatattgtaggtttgtgtgaaaatattttatgtattttataaatatatatatatatatttattacgtatttaaataaaagttaaaaattaaaaataaagtaaggggtgggggtgttggttagagagagaaaattaaggtagagggggagatttttagtttgaggaaggatttgttaaaaggagtaatgttggagggggagtagtggtattttaagagtaggtaaaatagattttagatatgcggtgtggggagtgagagtttattggggttaaggaattaaaagaaaagaaggaaggttaaggaatagttggtttaatagtttgttttaggtttgggttggggaggggagatgggtagagtaagaattggagggcggtatgagtatggggtaggagtgattgtgggagaatttggggtagggtgaggataggaggggagggtgttttgggggagggtggggtttgggaaagatgtttagtattgttatatgttttagtatttttatttttttattgaaagatgagaacgtgttgagggtttaaggtagttgggtaagagataggagtagtataaggttttaaggtggagaggggcggagggattagggagggatagtttagtatttgtgggttggagggtggggtttttaagagggtgaggttgaggatgaaggagtggggaaggggttataatgaggtagggtttagagtaggtatttgtattggaggggagggggtatttgcgttgttttgcgttttgtttaaggtttaattgttattagtattagggttttttttgggggtttggaggggagtgggatggagggaagattttttcggataaaaggtagtattagaaagttagagttagggatatttgggaacggggaggtataggggtagtattgggtgaaggttgtttgtaggaaaggtttataaggggtgtaggagggattttcggtggcggggataggggatgagggtagaggatattttagaaatggattagagaatagtatataggaaggggtagtagggagttgggagggtaaaaggatttagcgggttttgagatgggtagggaggaggtgagagggaatttggtgtttttagattattggttattagtaggggtgggatgagagagaggagaggattttcggagttagaggcgaggggagaatgagttggggatgagagaagtcgtaggaagaattttttgttcggagtttgtagattttaattttttagtttgagagttaggattttttatagtttttatagtagtaggaagtattagtttcgggtttcgagaaaggagggtttttattttaggagttgcggtttaggagttgagaatacgtcggtttcgggagaggataggattttagggatttgagagtcgtttcgagtatcgggggttgtggttgttttagtggtcgcgttggaagggtattcgaatgttatttataggagtagtttcggaggtagttcgggaatttatgggttttagaaggattggtttgttcgaaaagtgagaggaagcggaggagacgcgaggagagaaagagtaggaggagattagaaagtgtaggtgatgcgcgatttcgaggaggattgaaaagtgacggggaagtagggttgaagtgtggcggtaacgggtcgcgtttagttttttgcgttatcgatagggtataggagtttcgttttgatcgtatagcgttcgtcgttatttattcgattttcggaaacgtttcgttgttttcgtttcgtcgaggatcgttaggaacgttatttattagtagtagttttcggaggtgtaaaagggaagatgttagttagaagtaggaagatcgggtttagttttatggtttcgacgtcgttatttttttagcggtttaagtagtggtcggggagaaggcgtcgcggaaatttagttatttggttcggtttttcgatcgtttatttaatgaaattggggttcggaatttagggttaattacgagcggagagggcggggttacgtttggaagagaaaattttagtgggttggagatttggggagatttagaaggcgggatttggggtttagaaaatggggagtacgcgggagcgtagtttaaagtagggattagtttcgagtagttgagagtatagttttaattttataagtacggttagggttttgtttgttttttcggtatcgcgattatttattttcgcgtttttatttcgaggagcgcgggttttattaagtttttttcgtcggtcgttttattaaatcggtttttattggtttgttttttttaggatagataacgcgtggttatttttttaatatatttttttaatcgcgtatagcgttattggtaatgagattagtgattagatttgtagatttgtttttagattttagttatttttgttttttagaagtatttgtcgtagtagaatcgtttagattataaatttttttagacgttttagttttataattttttttttttttttttgatttaaagttaggttttttttttatttttttatattttttaagtgtttgaagttttttagggtcgtttttttatttagtttttgggtgattatagggttaaggaggcggttttttgtggtttattataatattaagttttttttagatttttttttttagtttgttttaggatatttgtattttcgattatagttttttttaatgtgagagatttataaagattttttatacgtttgttattatattattttttttttttttttagttttttttaagaatattattatttttggttttttttgattttttttttttttattattttcgggagttaaagttagtttttttaacgttattttaattttatagttataattttagtttaggtttttttttttttttagtttagattattgtatagtttttttaaatacggtgtttgttttagttataattagagtgttttaagttatttatagcgttttatttgttgaatgttatatatgatggatgtttttattttatcgtggaaaattttagttgttataatttgttgtttggtattatttttatttttttggtgatatttttttagggttgtagtaaacgtgggttttgggatttttttattttattttattaggatgttattgtttaagtagttttttttttttaggttattgtaatttttgttttggaatttattagattatattatatttttaaaatttttttaggttggtttgagtgtagtgtgtataattaattgattataattagttatagatgtttttgttttttttttatttttattgttttatttgattagtttttaaaataaaaagaaaagaaaaaagaaaaaaaggaaaaaaaattttttagggtagatagtggtgacggtggtataattttgtgattacgttagaagttattgagttgtatattttaaaaggataaattgtgtggtatatgaatttttaatttttaataataagaatgttgtttcgaaagtttttttttattaagagaattgttttgtttttaacgtatattttttagtcgttgggatatttaggtagaggttattaaatttagttattgcgtagaattatttggagagtttttaatatttatgtttttaggttatagttataatttaggttgttaaattagtaaatttaggttggatttaaattttagtattttttaaagttttttaggtgatttcgatgtgtagttaagttttagaattattgatttagttcgtggtttgaatttttttgatagtatttattgtgttttgttatgaattttttttttttttaagagaggagttttgttgtgttatttagttggaatgtagtggtatgattatagtttattgtagttttgaatgtttgggtttaagtaatttttttattatagttttttgagtagttgggattataggcgagtgttattatatttagttgttatttattattttttattttatgaattttttaagattaggaaatgtgttcgttttttttttgttagttttataaattttttttttaagtttaattatttttgttattattaattatttttttatgatttttagtttatatttttttgtggatgaaaatgtaatgtattcgagaattttaataattttttagtttttttatttatatttattgataatttattttgatttttataatttattgagtatagtagggatcggggttttttttttattttagagagattatttttattgttaaagattataagtttagtgagagattgagagggagatggatttagtttttttgatataggttttaagtttttatttttacggtgtttattttttttttaggatttttttcgtgtgttagttttagtaaaggatttgatttagttcgtttttaaaaaagatttttaatagtttaataataataatgaatatgtaaggtttgttttaaggtatttagaaatggttttagggagttatgaagttagtttttttttgggttaggggaggtcgagatggttttgagttttaggggagttgttttttagtgtttaggtttgggcgttttttttttattaagttttttaggttttttgtttaaagttttttttttttattttatttttaatttcgtttgttttattttattaattacgtttttttttttagtatttgttttatattttatgtatttattagtatagaggcgattttttttttttagattttaggcgttattgtagggttcggaaaagaaagagaaacggtttagcgcggtcgtttatataatttagggcggggtttcgtttcgttttcgaaagtttttgcgacggagtttttttttttgttgtttaggttgaagtgtagtggcgcgatttcggtttatcgtaattttcgtttttaaggtttaagcgatttttttgttttagtttttcgattagttgggattataggtatttattattaagttcgtttaattttatatttttagtagagacgggatttttttatgttggttaggttggtttcgagttttcgattttaggtgatcgttcgtttcgattttttaaagtgttgggattgtaggcgtgaattatcgtgttcggttttgttcgtatgtgttttgaattttgttgttcggaatttattgcgaggattgggattattcgttatttcgttttggtttacggaaaatgaaatgtgtttattgatatagaaacggaataacggcgttgtgggttggggagggtcgagttgtttttaggtttttggtttttagttgtagggtatttatatttgttcgttatgaaaatgtagattcgtagggtaggaatttcgagttcgggttggagcgcgatttggaattcggtttttttgaaatagtatcgcggaggattttgattcgggtgagtaggaaattgcgttttagttttttttacgggtcgtttacgtattttaggattcgaaaacgttttttgttgtttcgttattttaggaaggtagcgttcgtttttgggcggttttgatgggaatcggttgcgtcgttcgtaggaaaatttataattaaggggttaggaaaaagttttttagggtttcgttattttagtgaggattttaatttatatttttagtttggtttttatgaaagattggagtgatttttattgaaatgatataaggggtttagggagttgcggcgtttagaatgcggtgatagcgtcgtttcgcgttttttttttgatttgttttcggcggacgcggagaagtttgttggtttggaggttggaatatatcggggattaaatgtagagaatggagaaaagagggaaggatggggggacgtgttgaagaaatgagggaagagataggaataaaaggggagagaaaaagtaaaggagagtttttgtttttttttttttgagacggagttttgttttgtcgtttaggttggagtgtagtggcgcgattttggtttattgtaagtttcgtttttcgggtttagggtattttgttgttttagtttttggagtagttgggattataggtttttgttattacgttcgattaattttttgtatttttagtagagacggggttttattgtgttagttaggatggtttcgattttttgatttcgtgatttgtttgtttcggttttttaaagtgttgggattataggcgtgagttatcgtattcggtcggagatagaaaatttaaaagacgtagttttattattttttttatttttgttttttatttagttttatttatgaatatttttattataaatttttttttttttaaatttgtaaatatgttgttattattgttattttagagtttgtgagggtaagttgtagatagtatgattttttatttttagatgagttagggtgtgttttttgggtataagaatagggtttttgttttgttttgttttatataagtaaagtataagttttaaagaggataatatttttaaattattttattgggatatattttgtatgtaataaattgtatttatttaaaatgtttaatttgttgaattttagttgttgtatatatttatatttttattattatagtgaagataaagaagattttaatcgttttttaaagaatagttatataataaaattttatgttgttattaaaaagagtaagagtaattttaagtattgttatgaaaagatgtgtttagtatatttttaattttttttaaaaggttaaggaggttgggtatagtggtttatgtttgtaattttagaattttgggaggttatggtaggtagataatttgaggttagaagtttaagattagtttggttaatatggtgaaattttgtttttattgaaaatgtaaaa

SEQ ID NO: 2161 - DNA, 7847 bp, Artificial Sequence
  chemically treated genomic DNA (Homo sapiens)
tttttaggttgtgtgtatattgttaatagtttttgaggttgaacgaaaaagaaaagtattttattggattgtttcgggtttaggttgttagtgtatattgaatggatttaataggaaattggagatgtaggaatgttaatttaagtagtagatgtaatatataaataagaagttcggaaaattggaaattaattttggttagattttttttgtgttagtgtttttttttttatttgtattgagtttgtattatggggtttttggcgtatggtttttgttgtgtgttattttttaataattatttgtgagttttgaaaaaagattttgagttatagaaggaaaagaataaaaatattttataggttattaaagtttgtgttttttgggttaggataaagtcgttgttaaaatatattttttagagttttgtttgatttagttttaaacgtcgttattattaattcgtaattttgtttatgagtttagttgtatatttttggttttgtaagggatattaaggattttagatgcgagggtttagtaataattttttttttttttgtttttttttttatatttgggttttttgttttgttttagtttttgtttaatatgagggatgtatatttaattgttattagcgttttggataagttaattttttgaaattttttattttttattgttatttttttagttttggtatttttgtaatttttaggttgttttggtttttttgaattttgtttttgtttggtcgttgttttttggtttattgaggaatttatttggagaatagggtggtgtttaagttgtttcgttcgtaggagtttttagttgtattttttttttttggttggtttttttttgttatttatattttttattttgtgttttcggggttttggtgttatatgtttagtagtttatttggttatttttagtacgtagttttaattttcgatatttttttgtattagatttttgttttttttgatgtttgttatattttttaatttagtattatttgtaaatttaattaatatgtcgttgtttttttgttttagatcgttaatgaagatgttatggcggtatttggtaaataatatttttaaggttatgaggagaggagagttaaattgttaatatttttgtttgttgtgggagaaagaagtaattaagtgtttatatgtggtttgagttattttttttgagttttgttaatttttttttttagattggggttaggtttttacgttttttttttgtttcggttgttgtatattcgtggtaatttttatttggaaaatgaagaatattagattatgttttttttttatttttgtttggtttttagtaggagagaaatagttattaattgagtatttgtagggagagttaaggtatatggtaaagataaagtagtggttattaagtttgttatttatttagttttatttttaaagtattaatcgtggtagtggaaaatgtttaacgaggattaaggtataaataggggagagaagacgtatttttggtgagatggtttttaaagggttggtttatatagtttgtagtttagaggagtgtgaggggaggttattgtattttagtagtttgtgattttaaagtagatttggagttttttgtgagtttatattttttttttgtattagtaggtatagtttattgtgaattttggtttgttttttttttatattaaattgtagatgttttattgtaatattgtaaattatttgggttagaaatattgaattatgggagcgatttaggttagtgttatttacgtttagaaaattgatttcgggttatttattgtttttcgtattttttttttttttattttttattataggtttgttttgggtttggaggtttttaattattttttagatagagtgttttggaggtatttttggattagagtttagattggtttagtagaggtagggtacggattttagatttttagtgtggaggggttttgggaaagtggttttagatgtttttttgtgtttagtggataggtttggttcgttatttgtagttttttttttagtttaagtttggtatttttaagtttaaggatatatagtataagcggtatttgtttcggttggttagtttaggttgttttatgtttagagatttcgtaggggatggtttaaggagagagtgataggtttgtagaattggtattaggttattgttttgtgttttttttagttataaatatttttatgtatatttattaaataatgaggggtaggagaatatagttatttaataaaaaaataaaaatttgattttgaagttagattttttgagtttgaattttggtttggttatttgaatagttgtgtgattttgggttcgttgttttattttagtttttttatatgtaagttgggataataattatatgaattttagggttgttgtaaggttttaaaaagtagatacgtgtaatatttggttgttatttattatatgttttagatattgttgaggttaggattagtaaacgttttttataaaggtttatataataaatatgtttagttttgtaagttataggtttttgttatagttatttaaattttgttgttatagttttaaagtagttataggtaatttagaaatgaatgagtggatttgttttaataaaattgtatttatgaatatggaaattaaatttgtatgttattaaatatttttttgatattttaattattaaaaatataaaaatagtttttagtttatagattataaaaagaagtggtaggtcggtttggtttattttgtttgttttggtttaggtgttagagatgtaggtgtgatgtgttttattatagtagttcgtgtttatggatggagttttttagagtattttagagtttgagaagttgatagattattttttaatttttaagggattattttgtttttattaaggtttgtgattttgtttttcggtttggttttgtttttttttttagatatagggttttattttgttttttaggagtgtagtggtatgattatggtttattttattttttattttttaggtttaaatgatttttttattttagtttgtcgagtagttgagattatagcgtatgttattatatttagttaattgtttttattttttgtagagatgaggttttgttatgttttttaagttggttttgaatttttgggttttaagtaatttttttgttttagttttttaaaagttgggattataggtgtgagttattttgtttagtttagcgatttttttttaaaagttttttttgaaatagggatagttagattttaatgaggtttaaggttaagggatggtaattttgttgtaaattttcggtatttggagttttaatttttgatgtaagttttagattttagagttatattgtatattttataatagtcgttggtttagtgtgttggagttttaatgtgggtgttgtatatagagattttgttggtaggaagcgaggatattgagttgttatttgtttttattaagttttgttgagtagggaaggtagaaattatttgtgttgggtttgaagtattgtaaatatttgtttttgagtggaagggttagagtagatttaaggattggttaggtagggttttttgggtaagaaatagtgtttttttggatgtgtgaggtagcgtttggatgtgtggggaaggtgttattggttaacgtatgtcgtttgggaaaatggttattgtttatttagattttcgggattttatatttagattgtattttattttagtttttgtttggtttatgatcggtatttagaaaattagatattttttagagtgatgtttttgttttaatattttttttaaggtattatgaagatgtttaatattttattttttttattaaatttaaatttttttgtttggttgttaagggtttttatatttagattcgattgagcggtttttagtttatataggggattttttgtgatattattttaagtttgtgtgtgttttaaatttttagaagtttttatttttgttttttgttgtatttggttacgtttggtttttattttagtataaagatattttgtagaggagttatagatgagttatttagtagtgttttcgtttttttatttattgaatgggggaaataaatgtatttattttacggggttgttgcgtttaattagaacgttcgtgtttagtattttttgggtaatgttgcgttttggaattggtttcgtttagttttagtaatagcgagttaggtttgattttagattatatttatttttttttttttttttttttgaatttttatatatattgtttgaattgtatgattattatgaaatattgtttaggtaggtgttttttttttcgtttaggttgtagcgtgtagattttttatattgttatttttttgtattttttcggttttttcgcggtatttggttttatatagttttgggtttggatttagtagttttatttttattaatttattgaaatgttgttataaatttttgaatatttttttttatgaggggttttagggggaagattgaagagaagttatttttttaatatagcgttttgataggtcgatagaaaatttgattattagagtattggtttgtagacgtttattaatgttatatatttaaggaataaaaaaagaaaaggttttgttaaaatgatttttgagaggtagttgagtttttagtggacgggagaatgttatttgggtgggggttagtttttatcgaattttgattgtcgttgttttttttaggaaagttttggaagtttatagcgtggttagttttgtttggagtttttacgagttttaagaatttaggttttttttttgagggtttttaaagttgtggttaaaggttaatgggttttaagggtagtttttagggttgggaggtatataagaattcgttagattagtcggatattagaagataagtagagagatttttttagatttatttagattacgtgtacgtcgtaagtagtttttggagaaagtgggtggggagtggttagtataagttttaaagtagaacgttggtgtaagttagagttagtttggtttagggttttttgttattttttagtgtttagtcgggtttcgtattgagtgttcgcgttgatttttagggtattagtgagtagaggtagggttgaggtatagacgttggaggtaagtaggtgggtataatttttggtaaagtagaggttgttgtgggtgggtttggtatatttacggtgggtcgggaatttaagttagagtttattatgggcgtagggttttttttggtatggtggttttgttttggaaaggtaagaaaaatttggttttgtagtggtttatgtttgtaattttagtattttgggagattgaggtgggcggattataaggttaggagtttgagattagttaggttaatatggtgatattttgtttttattaaaaatataaaaattagttatgcgaggtggtatatgtttgtagttttagttatttaggaagttgaggtagaagaatcgtttgaatttgggaggtagaggttgtagtgagtcgagatcgcgttattgtattttagtttgggagatagagcgagattttattttagaaaaaaaaaaaaaaaagaagaaaagaaaaggaaaagaaaaagttgatttcgagggagagtatatggggaggtaaggttagttcggttaggggtgttgtaagggagggtagacggttattttttttatgtagagttggatatttgaaggttgaagttttttatttttgatgatgggaaaggaaagttagtgttttattgtataatgaaaagtttttttttttatttttagtttattagaatatatatgaacgtaggtgatatgtcgattgttagttggattaagaaaatgagaagtaattggattttgttttttttttaatttaaagtttttattgatttttatggagtgaattaaatatattagaatgaaataggatttatagtttttttgtgaaggaaatgggatgttataaatgtgatatattcgtttttgttggggggaaaagtaggttttagagattttttagggaacgcgtaggaatgagaagggaagaatagtgatgggttttatttattttaatttatttttcgtttagtttaagtttttttggggttgtatataaggtttcggttttttgggaggtggttttgggtgggcgggtggtttttttagtttgttgggaatttgtatatagttgggatggggaggttttcgttgtttgagttttgttgtttttgtttatggagtttgaataaaatggagagaaaataggaagtgggaagaagagagagttggaatagtaagaaggtagagggagcgtttggcgtggtagggtggttttagatgattgaggagataggttttggttgagaggtaggatgtaagtttgtagttttggaaggttttgtttaaagggggagttaggttgagatttgtagagaagtttcgaggtttttttagggtagatttttttttgtcgatagaatttaggttgtttggggattggaggagcgttttatttgaaattttgtaattatttttatttttatttttattgttggaggggttgtttcggttttttttttttgtttggaggtttggtttttgtatttagtagtttatttagcgtaggaatagtggtgtttaagatgtatttaataggtttgttttttgtgtttttttttgtttattatgggtagaggtaacgtagagtggggtattgggaaaagtattgggttttaaaaggttaaggttttagtttttgttgtttttgaatgagttaattttggttggtatttagttaggttattttatttttattttaggattattttgtttttgtttaaagtttgtttagtggatttttttttaaggttttgtatttttgtagttattatgtttatttgttttttgttaggattcgagttttaaaagtttattaaagtttaatgttttattagttattttatatatatttgttttttggttagtaattattgggttttagggtgtgaggaaagaggaagtttgttttttgttgttttaggatggtggttaaaggtagttagatgtattggagtacggggcggggggtttgtttttaagttatcgtttttttaacggggaagggggtgtttttttggtttagggatatagttttatgttgaatttttttatttggtttattttttgtaatggtagaggttttatagatttagggttttggtttggtatttttaggtagagttttggttatttgggtttgggtttattttttttgttattttaataggtattggggtagggaggtttttttgggttttggggtatagttttgttgataatttaagtattttttttttgaaagatgaggttttttttgttttatgagtttagttgattttagaagattttatttgtaataaaagagaagggtggataagtgaaatgatttttttttggtgtgtggtagggagttggatggttttttttaggagtttggttagttgttatagttttggggtagaaaggtgtttagagtttatttgtttaagttttgatattaggtttaaatttagataggttgagttttggttgaagattatatagttagaggtagggtatgggttagaattgagggtttttgtttcggatatagtagtttgttattgtattttaaatttagtgataagagttttttgttattgtttagt

SEQ ID NO: 2162 - DNA, 7847 bp, Artificial Sequence
  chemically treated genomic DNA (Homo sapiens)
gttggataatgataaggagtttttgttattaagtttggggtatagtggtagattgttgtgttcgaggtaggggtttttagttttggtttatgttttatttttagttgtgtgatttttagttaaagtttagtttgtttggatttgggtttggtattagagtttgagtagatgagttttgagtatttttttgttttagagttgtggtagttggttaagtttttgggaaaggttatttagttttttgttatatattagggaggaattattttatttgtttattttttttttttgttataggtaaggttttttggggttagttggatttataaggtaggagggattttattttttagagaaggaatgtttagattattaatagaattgtgttttaagatttagagagatttttttgttttagtgtttattagaatgataaaaggggtggatttaagtttagatgattagggttttgtttggaagtgttaggttaggattttgggtttgtagagtttttgttattgtaaaggatgagttagatggaaaaatttagtatggagttgtatttttgagttaagagggtattttttttttcgttgggggagcgatggtttgggaataagtttttcgtttcgtgttttagtgtatttagttgtttttggttattattttgaaatagtagggagtaggttttttttttttttatattttggaatttagtgattgttgattaggaagtaggtatgtgtggaatggttggtaggatattgggttttagtgggtttttggagttcgggttttggtagggagtaggtaggtatggtgattgtaggggtgtagagttttgagaaagggtttattgggtagattttgggtagggatagggtggttttggggtgggggtgggatggtttagttgagtgttagttaaggttgatttatttaaaggtagtaggggttggaattttggttttttgaggtttagtgttttttttaatattttattttacgttgtttttgtttatagtaggtagaggaaggtatagggggtaggtttgttgaatgtattttgggtattattgtttttgcgttgggtggattgttgagtgtaggggttaggtttttaagtagggaggggaggtcgggatagtttttttagtagtaggggtaggggtggaggtagttataaggttttagataaagcgtttttttagtttttaggtagtttggattttgtcggtaggagagggtttgttttggaaaggtttcggggtttttttgtaggttttaatttggttttttttttgaatagaattttttaaggttgtaggtttgtattttgttttttagttaagatttgtttttttagttatttgaaattattttattacgttagacgttttttttgtttttttgttattttagtttttttttttttttattttttattttttttttattttgtttaaattttatgaataagaataatagagtttagatagcgaaagtttttttattttagttgtatgtaaatttttagtaggttgaaaggattattcgtttatttaagattattttttaggaagtcgaggttttgtgtgtagttttagaggagtttgagttgaacggagaatgggttgaggtgggtgggatttattattgtttttttttttttatttttgcgcgttttttgaagagtttttggggtttgtttttttttttagtagagacggatgtgttatatttatggtattttattttttttatagagaggttatagattttgttttattttggtgtatttaatttattttataggaattaataaaaattttaaattaaaaaaaaggtaaaatttaattgttttttatttttttgatttaattggtagtcggtatgttatttacgtttatgtgtgttttggtgagttggaggtgggagaaggagttttttattgtatagtgaggtattaattttttttttttattattagagatggggggttttaatttttaagtgtttagttttgtatgaagggggtgatcgtttgtttttttttgtagtatttttggtcgggttagttttgtttttttatgtgttttttttcggggttaattttttttttttttttttttttttttttttttttttttttttttgagatggagtttcgttttgttttttaggttagagtgtagtggcgcgatttcggtttattgtaatttttgttttttaggtttaagcgatttttttgttttagttttttgagtagttgggattataggtatgtgttatttcgtatggttaatttttgtatttttagtagagatagggtgttattatattggtttggttggttttaaatttttgattttgtgattcgtttattttagttttttaaaatgttgggattataggtatgagttattgtagggttaaattttttttatttttttagagtaaagttattatgttaagaggggttttgcgtttatgatgagttttggtttgggttttcggtttatcgtggatgtgttagatttatttataatagtttttgttttgttaggagttgtatttatttgtttgtttttagcgtttgtgttttagttttgtttttgtttattgatgttttgggaattagcgcgggtatttagtgcgaagttcggttgggtattggaaggtggtagagggttttggattaggttggttttggtttgtattagcgttttgttttagggtttatgttgattattttttatttattttttttaagggttatttacggcgtgtacgtggtttgagtgggtttggaggagtttttttgtttgttttttggtgttcggttgatttgacgggtttttatatattttttaattttgggagttgtttttggagtttattaatttttgattatagttttgggggtttttagagggggagtttggatttttgaagttcgtggaaattttaggtagggttagttacgttatgggtttttagggtttttttggaaggaatagcgatagttagggttcggtggaagttagtttttatttagatggtattttttcgtttattgaaaatttagttgttttttagaggttattttaataaagttttttttttttttgttttttaaatatatgatattggtgagcgtttgtaggttaatgttttagtgattagattttttgtcggtttgttagagcgttgtattagaaagataatttttttttagttttttttttgaagttttttatgaaagaaagtgtttaggagtttgtgatagtattttagtggattaatgaaaataaaattattgagtttagatttaaggttgtgtggggttagatgtcgcgaaggaatcgaggaaatgtagaggggtgatagtgtaggaggtttgtacgttgtagtttaaacggggagaaagatatttatttggataatgttttatggtaattatgtaatttaaatagtatgtgtaaagatttaaagagggaagagggaagaggtgaatgtgatttggagttagatttggttcgttgttgttggggttgggcggggttaattttagagcgtagtattatttaggaaatgttgagtacgaacgttttgattaaacgtagtaatttcgtgaggtgggtgtatttattttttttatttaatagataaggaaacggaggtattgttaaatagtttatttgtgatttttttgtaaggtgtttttatattagggtgaaggttagacgtggttaggtgtagtagagggtaggagtgagggtttttggagatttggggtatatataggtttagaatggtgttataggaggttttttgtgtgggttgggagtcgtttagtcgggtttgagtgtggggatttttagtaattaagtagaaggatttagatttgatggaggaaatggaatattgggtatttttatgatattttgaaggggatgttagggtaaaaatattattttggaagatgtttagttttttgggtatcggttatggattaggtagaggttgaggtggggtatagtttgggtgtggaatttcgagggtttgggtgggtagtggttatttttttaggcgatatacgttggttagtagtattttttttatatatttagacgttgttttatatatttagaggggtattattttttgtttaggagattttgtttagttagtttttgggtttgttttggtttttttatttagaaataaatgtttgtagtgttttaaatttaatatagataatttttattttttttatttagtaaggtttaatgaaaatagatggtagtttagtgttttcgttttttgttagtagggtttttgtgtatagtatttatattagaattttagtatattggattagcggttgttgtgagatgtgtagtgtggttttgaagtttgagatttatattaggaattaaagttttaaatgtcgggggtttgtagtagagttattattttttaattttgggttttattggagtttgattgtttttgttttaagaggggtttttgggaagaggtcgttaggttgggtaaggtggtttatatttgtaattttagtttttgggaggttgaggtaggaggattgtttaaggtttaggagtttaagattaatttgggaaatatagtaagattttatttttgtaaaaaataaaaataattagttagatatgatggtatgcgttgtggttttagttattcggtaggttgaagtgggaggattatttgagtttgggagatggaggatagagtgagttatgattatgttattgtatttttgggaaatagagtgagattttgtgtttgaaaaaaaaaataaaattaaatcgaaagataaggttatagattttggtgggggtaaagtagttttttgagagttgggaagtagtttattagttttttaagttttgggatgttttggggagttttatttataagtacgggttgttgtgatgggatatattatatttgtatttttagtatttagattaggataggtaaaatgggttaaatcggtttgttatttttttttatagtttgtgagttaaaaattgtttttatatttttaataattaaaatattaaaagaatatttagtgatatgtaaatttaatttttatgtttataaatatagttttattggaataggtttatttatttatttttgggttatttatggttgttttggggttgtaatagtagagtttaagtagttgtagtagagatttatggtttataaagttgaatatatttgttgtgtggatttttatggaaaacgtttgttggttttgattttaatagtgtttggagtatgtgataaataatagttagatgttatacgtatttgttttttaaaattttataatagttttgaggtttatgtggttattattttaatttatatgtggggaaattgaggtggaataacggatttaaggttatatagttatttaaatggttaggttaggatttaaatttagggagtttggttttagaattaagtttttatttttttattaaataattgtgtttttttgttttttattgtttggtgaatgtgtatagggatgtttatagttggggaagatataaaatagtggtttggtattaattttataaatttgttattttttttttaagttattttttgcgaggtttttgagtatgaggtaatttgagttgattaatcggaataagtgtcgtttgtgttgtgtgtttttaggtttggagatgttaggtttgggttgggaggaggattgtagatggcggattaggtttatttattgagtataaggagatatttgaggttatttttttagggtttttttatattggaggtttgagattcgtgttttgtttttgttgggttagtttgggttttggtttagagatgtttttaagatattttgtttgagaaatgattaggagtttttaagtttaagataggtttgtagtgagggatggggagaagggaagtgcgggaaatagtaaataattcgggattaattttttgggcgtgaatagtattaatttggatcgtttttatgatttagtgtttttgatttaagtaatttgtagtattatagtgagatatttgtagtttggtgtggaaggaaggtaaattagggtttataatgagttatgtttgttaatgtagaaggggaatgtagatttatagggggttttaggtttgttttggggttataagttgttgggatgtagtggtttttttttatatttttttgggttgtaggttgtgtgagttagttttttgggaattattttattaggaatacgtttttttttttttgtttgtgttttggttttcgttgggtattttttattgttacgattagtgttttagaaatggagttgggtagataataagtttaataattattattttgtttttattatgtattttggttttttttataaatgtttaattagtggttgttttttttttgttagaaattagataaaaataaaaggaaggtataatttgatgttttttattttttaagtgggaattgttacggatatgtagtagtcgaggtagaggggaggcgtagaaatttaattttaatttgggaaaggaagttgataaaatttagaggaaatggtttaaattatatgtgagtatttgattgttttttttttttatagtaggtagaggtattagtagtttagtttttttttttttatgattttgaaaatattgtttgttaggtatcgttataatatttttattaacggtttggaatagggaggtaacgatatgttaattaaatttgtagatgatattaaattgggagatatagtaaatattagggaggatagagatttaatataagaagatgtcgggagttagaattgcgtgttggaaatggttaggtgggttgttggatatatgatattaaggtttcgaggatataggatggaggatatgggtgatagggagggattagttaagaagaaaaggtgtaattgggggtttttgcgggcggggtagtttgaatattattttgttttttaggtgggttttttaatgagttagagggtagcggttagataaaggtagagtttaggggagttaaaatagtttaaggattgtaggagtgttaaagttgaaggaataataatgaaaaatgaaaggttttaaaaggttggtttgtttagaacgttggtaataattaaatgtgtattttttatgttaagtaaaggttaaagtaaggtaaagaatttaggtgtaggagggagggtaggaggagagagagttgttgttgagttttcgtatttaaagtttttgatgttttttatagagttagaggtgtgtaattggatttataagtaaaattacgagttgatggtgacgacgtttaaaattgggttaagtaaagttttgagagatgtattttggtaacgattttgttttggtttaggggatataggttttggtgatttgtggagtatttttatttttttttttttatggtttaggatttttttttagaatttataaatgattgttgagaaatgatatatagtagaaattatacgttaagagttttatgatatagatttagtgtaagtggagaggaaaatattgatatagagagggtttggttaggattaatttttaatttttcgagttttttgtttgtgtgttatatttgttatttgaattaatatttttgtatttttaattttttgttgagtttatttaatgtgtattgataatttggattcgaaataatttaataaaatgtttttttttttcgtttagttttaaggattattgatagtgtgtatataatttgggga

SEQ ID NO: 2163 - DNA, 2200 bp, Artificial Sequence
  chemically treated genomic DNA (Homo sapiens)
gggtgaagacgtgcgattttgatttattgtaatttttattttttaggtttaaacgattttgttgttttagttttttgagtagttgggtttataggtgtgtatgattatattcggttaatttttgtatttttagtagagacgggtttttgttatgttgattaggttggttttaaatttttgatttcgggtgatttgtttgtttcggttttttaaattgttgggattgtaggcgtgagttattgtgtttggttagattttttttttttagtaaggggatttatttaaatttgaagaggatcgggatggttgaggttgggtagtaaggttttattgtaaattttttattattgttttttttggttttttagagaacgttttagtaaaaggtttttagaatttttttttttttggtttgattgatatttttttttaggtgtagttttttttttattttttttttgtttggaggaaatgaagttttacggaattttttgttgaaattttttaagaaaaaaaagaaaggttttaagtattgaatgtggaaattgaaggggatgagttttaattttgaagtgtttttagcgtaaaattgttttttttagggttcgtgtggttgttattttagagtggaggttgtttgttgagggatttttgatttagttgttttttaggggaagtttcgtttttcggtataggtaatggtttgtagtttgatttttatttagttttatttgagtaggtcgggagtttttaggttgttttattttttttttttttgattttttattattattatcgtttttttttttttttatttcgttattttttttttatacgtgttttttttttttttttttttgcgtttgttttttttagaagttagtttacgaagtaaagttgttattttgaatttttgtttttttagttatttttatgtgataggatgtttttttagtagaggttttttttaaatttaggagttttttaaaagggagggttttttttgtagttttttttagttgggtagttttgggaatttggattaggtggagaggtagttggggggtttcgttgttttgcgttttagtttcgtttttttgtttattaggagaaggaaaggataaattttgggttatgaggttatttttgtttttggtttttgtttttgttatttcgggtgttgtttttttattgggtaagtttgttttgaggtaggggatttttgatttggggggtcggaattatattttttttttttgggttattgtgaatgggttttttttaatatttttgtgaggaggaaacggggtttttttgtattacgtagtttacggttaagtttgttgtttttatttggcggttaggtatgggaggtttggagttggaggagggaggaggatgcgttttaggtttcggttgttgttttgtcgggaattttatagatttttagtgtttttttgattttttttatcgttcgttgttttttttttgtttttttcgtgtagaaattttttgttttgtggtttattttttttggtttttaatttatattatttttgttttatcgttaataaatattttttgagtgtttttggttggaaggagggtagttttgatgttttttcgcgttttaggtttaagggtattatcgtagattatttttttaaaagagattttaagtaatttttatatttatttttttttttgttagaattatttagatatttgattgttagaaagtttatttttatttgtattttagattatttaaattgtcgtataagtagatcgatttttgtttttttttttttttaggagattagagattatttattaggaatagttttagagttgtttaaatttttaaatattttttttagtttgttttttttatttttttatatttagttgtttaaattttaggatgggagtgtttcgggggatttttatttttggttttatttggagatgatttagaagagattttaaatttgattttttgatttttgatttttttttaattttatgaaattaataaatatttgtagagaatggtttgtgtttacgatttattttatgtattgatgtgaaggcgggtgggaagttttttaggaagagagtgttttagtatcgtaaatgttaaattataagtattgagtggtagtgattataaaaatataagtgaaggcggtatggttta

SEQ ID NO: 2164 - DNA, 2200 bp, Artificial Sequence
  chemically treated genomic DNA (Homo sapiens)
taaattatatcgtttttatttgtgtttttgtaattattattatttaatatttatgatttaatatttgcggtattaaaatattttttttttaggaaattttttattcgtttttatattagtgtatagagtagatcgtaggtataaattattttttgtaagtgtttgttgattttatagaattaaagggggattagaaattaaaaaattaaatttgaaattttttttaaattatttttaaatagaattaggaatgaaaatttttcgaggtatttttattttgaagtttaagtaattgagtatagagaaatagaaaagatagattggaaaaggtatttgagaatttgaataattttggagttgtttttaatgagtaatttttaattttttgaaaaagaagaaaaataggaatcgatttgtttatgcggtagtttgaatagtttagaatatagataaggatgaattttttaataattaagtgtttgaatgattttggtagaaaaaaaaatgagtatggaaattgtttagaattttttttggggggatgatttgcgatgatatttttggatttaagacgcggggagatattagggttgttttttttttagttagagatatttagaaggtgtttgttggcggtgagatagaaatagtgtgaattgaaaattagaaagagtaaattatagagtaggaaatttttgtacgaagaaaatagggaaggaataacgagcgatgagagaagttaggaggatattgaaggtttgtagggttttcggtagggtagtaatcgagatttgagacgtattttttttttttttttaattttaggttttttatgtttggtcgttaggtgaaggtagtaggtttagtcgtggattgcgtggtgtaggggaatttcgttttttttttataaagatgttgaaaggaatttatttatagtaatttagaagaggaaggtgtggtttcggttttttaggttagagattttttgttttagagtagatttatttagtaggagaatagtattcggaatgatagaggtaaaaattaggagtaggggtagttttatggtttagggtttatttttttttttttttgatggataggagggcggaattaagacgtaaaataacgaggttttttaattgtttttttatttaatttaagtttttagagttgtttagttgaaaagaattatagaggaagtttttttttttaaagggtttttgaatttagggaaagtttttattgaggagatattttgttatatgagggtggttggaaaaataggaatttaaagtaataattttgtttcgtaagttaatttttgagaagagtagacgtagaggaaggggagaaagggatacgtgtgggagaggagtggcggggtggggaggagagagggcgatggtgatggtgaggagttaggaaggagagaagtgaaatagtttgggagttttcggtttgtttagatggggttgggtggagattaagttgtaggttattatttgtgtcggaagacggagttttttttgggaagtagttgagttaggggttttttagtagataatttttattttgaagtgatagttatacgggttttggaaaggatagttttacgttggaaatattttagagttgaagtttattttttttagtttttatatttagtgtttagagtttttttttttttttttggaaagttttaatagaaagtttcgtggagttttattttttttaggtagaagaaaagtgaaaaggaggttatatttaagagggaatgttagttaggttaggaaggagaaagttttagaaattttttgttagaacgttttttagaaagttagaaaaaatagtggtaaaggatttgtagtaaagttttgttgtttagttttaattatttcggttttttttaagtttaagtgggtttttttgttagaaaaagaaaatttggttaggtataatggtttacgtttgtaattttagtagtttgggaggtcgaggtaggtagattattcgaggttaggagtttgaaattagtttggttaatatggtaaaaattcgtttttattaaaaatataaaagttagtcgggtgtgattatgtatatttgtaagtttagttatttaggaggttgaggtaatagaatcgtttgaatttgggaagtggaagttatagtgagttaggatcgtacgtttttattt

SEQ ID NO: 2165 - DNA, 5981 bp, Artificial Sequence
  chemically treated genomic DNA (Homo sapiens)
gttgtttgtatgttttatttttagttttaaagtggtttttttttattttagtagatggaacgtataatcgggttttatatcgagatattttattgtttagggacgggtaggagatagatgttttttttttgttttaattgtaagaggtatgttttttttttatattaattttttttagtatagattttttatgggtgtcggattgggggacggttaggtttttttttttttacgaggtcgtattttagattattatatggggagaaattttggataatatttggtttttttaggtagaggtttttgcggtttttcgtagtgtttgtgtttttgggtatttgagattagggcgtggtgatgatttttaaggagtatgttgtttttaagtatttgtttaataaagtatattttgtatcgtttttaatttatttaattttgagtggatatagtatatgttttagagagtatggggttgggggtaaggttatagattaatagtattttaaggtagaagaattttttttagtatagaataaaatggagttttttatgtttatttttttttatatagatatagtaataatttgattttttttgtttttttttataggtatttaagtttatttgggtttggagtaggataggtgtgtaaaagaaaatatttcgggatttttaaattttttatgttaagggaaatatcgagtttgggaattgagttattaacgttgttatttttttttttaaatagaattttgttgttagaggtatatttagagtaattttatatcgggtgtatgttatagtaattttattttaaataggagttggtaaaacgaggttgatatttattgggttgtatttttagacgggtaaggtattttaagttatagggtgagataggaggttagtataaggttataaaggttataaagattttgtttataaaataggttgtaataaagaagttggttaaaatttattataattaagatggttacgagagtgatttgtggttgtttttatttttatatttttattagcgtatgatagtttataaatgttatggtaatgttaggaagttattttatatgtatgtttaaaacggggaggtatgaataatttatttcgtgtttagtatattattaagaataattataaaaatgggtaattagtagtttttagggttgttttgtggagtagttatttttttatttttttattttaggtaggggagatgaatttttttttgagtttgtggatagagggtagtttggtagagggataggtattaataaagtttttgagtgtgatttgggttttgagtttagggatggtaatggggtaattgagattggattagaagttgtttggaagaagagagggttattattagagtataagagtgtgaaatttatttggtaggaaaaaaaaaagagtaattgttgttcgtttaatagagtatatattttttgtaatttaggtgggaggttgtgagttttttaagtatagaagttgttttttgattttagtatagcgaggaggtgttgaagagcgtaggtttggagaatgattatttggattggaattatagttttattaatatggaatttagttttttaggtttcggtttttttatggagaatatggtgtgataattttatttttttgggagggtggttgttaaggtgagtgattgtatacgagtttttttagttgatgttatcgagcggtttttgtttttagagtttttaagagggtggcgggttatttttaagatggcggtaagttttttgttttttgatttggggtttttggttttatagattttaaggaatggaattttggggtatgtggtgagtgtttttattaggacgaatttaggtatttagatatgcgggaataatggcgagtttttagttcgaatgggagcggtaatgggtgtttcgttggattaggagtatagcggatatattgtcggatttagaggggtggatattagtggtgggtttgtgatggcggtaaataatagtagatagtaaatggtagtggtggatggtaagcgaaagtttagttttagttataataaatacggattagaagagtgtgtagttgtaagatttaatagagtgaaaatagacgttttatataaagggagggaatttaaagggggttgttattgttgggtcgaatgtttgggtttttgttttaattattgtttttttttttgtgtttttaggtaatagatgattggttatttttttattttttgtttttgtttaattagtattttagtgagttttttttattatttgattggtcgggtgtgagttaagttgtaagttttgtgtttaaaggtggatgtggttatttttttagttaggtttagggatttttagtcggtttgggatatttagttcgtttcgttttttattgatatttaatatattttatatgtttagtagataggagttattattgtatgattgattgttgaattatattttaaaataattatttatattttttaaggttttgttatattatatgtatattagaggtaatgaagtattaaaatttaaggttagggaaggattgcggtggataagggaagtgtttagggcgttaaaatttaaggaggtattgtattaattgggagtgagttgtgtgtgttgtgttttttgggtagggcgttttattgttttttcgagttttgttttggttgaggttgtgtttttatttggttattagttgtttgtagttttttttgattttgttcgtgaataagggtttttagggaagtttttcgttgttggaaatagtagtagtattatttagagtgaagtttttgtttatatgagtgttagttttgtttatatttattttgcgtttttaaggtattgtttttgttttagaaagtattagtttagtttgtttatagttttttaggatgtgttgttgtttgggtttttgattaggaagtaaaaggtttagaggggttgagtgtgtgtgtgtgtgtgtgtgtgtgtgtgtgtgtgttaaagtgaggttattgttaatttttgggagaatttgtgttttttttggatgaattttttggatgaagaattttttggatggggttgtttagttttaggagtggattttgtaaagtaaaatagattttagtatagggagttggttggggggttttttttttttttgtaggtgtagtagtattgaatttgattttatttaggttttttttgattttaggatttaaagttggggtaggttttgggttttgaggttggttgggggtgattttttttaattatggaagtttttagcgggggtttgtaagggattgtgagttgagttaaggagaatggaggtggggtgttaatcgtttttaaagggaaatgttattttttatttatagttagttagtcgagaatgggagtttttaaagggaggattatttatgggtttgtttgatttagttttttttaattttttttatttttgtagtaaaattttagttaaggaagataaagagatttttggagattaaaatagaatttttaattcgggttaatagtaggtttatgtttaaaatggttgttaattttaataaagaaagtagttagtttatatgtcgtttgagatgggaaaaataaggtaggatataggttttagataaagatagtaaattatttaattcgtgataattttgaggaaattggtaatttagttatattgattagttattttttaagttggattagggttggaggttggggtttcgaggtaggtgataagtttttgagataagtttgtatttgtaatttgttataatgttgggaggggttgtttaaaattttagtttatgtgttatttttaaatagtttatattaaatgttaattgtttttatgtgcgtttatgtgaagagattattaaataggttttgtgtgagtaatatggttgtgtattttatttgggtgtaggcgggttgagttcgaaaagagagttagcgaagggagataggggtggggtcgttttataggatttgggaaggtaatggaaaattatagttaaagggggttgttttttggtgggtaggggtgaattttataaagtatatttttaagggtggggagaattataaataatttttttaagggtggggaagattataaagtatattgattagttagggtggggtaggaataaattataatggtggaatgttattagttaaggttgtttttattttttttgtggatttttagttattttaggttatttggatgtatatttgtaagttataggggatgcgatggtttggtttgggatgcgatggtttggtttgataattattatttatgttatgtttattattttaagttttattattattattttatttattttattttattttttttttatatattcgtttttattttggagaggttagatgagttagattttagggaggtttagaagtgggtaaggggaaacgggaaaggaggaagatggtatgggtgtgtttggttaggggtgggagtgttggacggagttcgggataagaggggttttgtagttattggtatataatgtttgggagtttttgttggtgttgggattattttagtgagttttgggagggaattgaagatttttaattattaatgtatttgtttttaaaatcgacggggggaaggatatgtttaggtttaaggatacgtgtaggtttggatgatttcgggttattagggagttttcggagtattttgatttttagacgggtttgatgaaacgagtatttgatttagtaggtttgggttcgggttcgagaatttgcgtttttcgcgagttttcgcgaggtaagtgttgtaggtgcggggttaggagttaggtttcgtttttgcgttcggagtcgtttttagtatagggtttgtgagttttattttttcgcggcgcggggcggggttgggcgcggggtgaaagaggcgaagcgagagcggaggtcgtattttagtattgcgtagggatcggtgagtgtcgtttttgggggtagcgtttagtaatcgcgttaggagcgcggagaagggtattgggagagcggcgttcgtggcggagattagcgtttcggagtacgggtacgacgggggtattttttcggttgttagtaattaataataataataattataattatagtaagggcgttgatgggcgggttcggagtacgtttgattttggtttttattaggttgtttaggtttttgatgacgtattagaaatatttttttaattcgcggtttttttgtaggagaggttgggaaggggtgggggacggggttcgggggaggttttcgagggattttagtaagcggggaagggcgtcgggaaagttttagatttacggttgcgcgggttacgagtttattcgaacgtcgattattgtttttcgtcgatttttattttttgggaacgcgcgaaagtaaatttaagttagattgcggaggtcgttggggagggaaggtttaaggagttttcgtcgattttgttgaataaagggggtttcgagttgggtcgagatggggtatgcgcgggaagatttttgttcgttgttttttttttatcgttttagtggatgttatgtttggggttttttcggcgcgtggggttgacgtattttcggggtttatcgtagttggtcgggatcgtggagtgggtgcggtggacgaagggaggtaggatagtttcgggggtggtagaaggagttcgggtatagttgagatttgcgtttttattttattaatatttatagtaggtgttgtcgagttgggtaattgggatggtttaagttatttggttaaattttaaattacgtttgttattgggaagtagagtttagtgatgttaatcgcgtttttatttttattatcggtgttagttttaaagggtttttaaaatggttgtgttattttttagt

SEQ ID NO: 2166 - DNA, 5981 bp, Artificial Sequence
  chemically treated genomic DNA (Homo sapiens)
gttgaaagatgatatagttattttaggagttttttgggattgatatcggtggtggaggtagaggcgcggttagtattattggattttattttttagtaataaacgtgatttaaaatttaattaaataatttgggttattttaattgtttagttcggtagtatttgttgtgagtgttggtgggatgggagcgtaggttttagttgtgttcgggttttttttgttattttcgggattgttttgttttttttcgtttatcgtatttattttacgatttcggttaattacgatggatttcgagggtgcgttagttttacgcgtcggggaggttttaggtatggtatttattggggcggtggggggggaatagcgggtaggggttttttcgcgtatgttttatttcggtttagttcggaattttttttatttagtaggatcggcgagaattttttgaattttttttttttagcgattttcgtagtttgatttgggtttgttttcgcgcgtttttaggaaatagaagtcgacggaaagtagtggtcggcgttcgggtgggttcgtggttcgcgtagtcgtggatttgaaattttttcggcgttttttttcgtttattagagtttttcggagatttttttcgagtttcgttttttatttttttttaattttttttgtaggaaggtcgcgggttagggggatgtttttgatgcgttattaggagtttgggtagtttggtgggaattagaattaggcgtgtttcgagttcgtttattagcgtttttgttatgattatgattattattattgttagttattagtagtcgagaaggtgttttcgtcgtgttcgtgtttcggagcgttagttttcgttacgaacgtcgtttttttaatgttttttttcgcgtttttagcgcggttattgggcgttgtttttagaagcgatatttatcggtttttgcgtagtgttggagtgcggttttcgttttcgtttcgttttttttatttcgcgtttagtttcgtttcgcgtcgcgaagaaatgaaatttatagattttgtgttgagggcggtttcgggcgtagaaacgaaatttagtttttggtttcgtatttgtagtatttgtttcgcgggaattcgcgggagacgtaggttttcgggttcgaatttaggtttgttgaattagatgttcgttttattaggttcgtttgaggattaaggtgtttcggaggttttttaatggttcggagttatttaagtttgtacgtatttttgaatttaggtatgttttttttttcgtcggttttgaaaatagatgtattggtaattgggggtttttagtttttttttagggtttattgggatgattttagtattagtagggatttttaggtattgtgtgttaatggttgtagagttttttttgtttcgaatttcgtttagtatttttatttttaattaggtatatttatattattttttttttttttcgtttttttttgtttatttttaggtttttttggagtttggtttatttggtttttttagggtggaaacgggtgtgtggaaggaaaataaaataaaataaataaaatagtaataataaagtttaaaataataaatataatataggtaatagttgttaggttaggttatcgtattttaggttaggttatcgtattttttgtgatttgtaggtatatatttagatggtttaaagtaattgaagatttataaaagaagtaaaaatagttttaattgatgatattttattattgtgatttgtttttgttttattttaattgattaatgtattttgtaattttttttatttttaagaaggttatttgtaattttttttatttttgagaatgtattttgtgagatttatttttgtttattagagaataattttttttgattgtaattttttattatttttttaaattttataaaacggttttatttttattttttttcgttgatttttttttcggatttagttcgtttgtatttaggtgaaatatatagttatgttgtttatataaagtttgtttggtggtttttttatatggacgtatatgaaaatagttaatatttagtataagttatttagaagtaatatataggttaaaattttaagtagttttttttagtattgtaataagttgtagatgtaagtttattttaaaagtttattatttgtttcgggattttagtttttaattttagtttagtttggaggatgattagttaatataattgaattgttagtttttttagaattgttacgggttaagtaatttattgtttttgtttgaaatttgtattttattttgttttttttattttaaacgatatataagttagttgttttttttgttggggttggtagttattttgggtatgagtttgttgttggttcgaattaaaagttttgttttggtttttaaaggtttttttgttttttttggttagagttttattgtaaaggtgaaaggggttggggagggttgagttaagtagatttatgggtggttttttttttgggagtttttattttcggttaattggttgtgagtgggagatggtatttttttttgggagcggttggtattttatttttattttttttagtttagtttatagttttttataagttttcgttaaagatttttatgattaggaagggttatttttaattaattttaaggtttagaatttgttttagttttaggttttggggttaggggaaatttggatggaattaaatttaatattgttgtatttataagagggggaggagttttttagttagttttttgtgttgaaatttattttgttttgtaggatttatttttagggttgggtaattttatttaaggggttttttatttaaggggtttatttaaggggaatataagtttttttaggaattagtaatgattttattttaatatatatatatatatatatatatatatatatatatttaatttttttgggttttttattttttagttaagaatttaggtaatagtatattttgggggattgtgagtaggttgggttgatgttttttgaagtaggaatagtgttttgggaacgtagggtaggtgtgagtagagttggtatttatgtgaatagagattttattttgggtgatgttgttgttgtttttaatagcgggaggtttttttaagggtttttgtttacgaataaaattagaaagagttgtaggtaattgataattagatagaggtataattttagttagggtaggattcggaagggtagtgaggcgttttgtttaggaaatatagtatatatagtttatttttagttggtgtaatgtttttttaagttttaacgttttaggtattttttttgtttatcgtagtttttttttggttttagattttggtgttttattgtttttaatatgtatatgatatggtagggttttggggagtataggtggttgttttggggtgtaatttagtagttagttatataataatagtttttgtttattgagtatgtaggatgtgttaggtgttagtgagagacgggacgagttggatgttttaggtcgattaagaatttttaagtttagttgggaaggtgattatatttatttttaaatatagggtttgtaatttagtttatattcgattaattaggtagtaaagagagtttattaaaatattaattaggtaaaaataggaagtaaagaaatagttaattatttattgtttgagagtatagggggagggatagtgattgagatagaaatttaggtattcgatttagtaatggtaattttttttgggttttttttttttgtatgggacgtttgtttttattttgttaaattttgtaattgtatatttttttggttcgtgtttgttatggttggagttgagttttcgtttgttatttattattgttatttgttgtttgttgttgtttgtcgttattatagatttattattgatgtttatttttttggattcggtagtgtgttcgttgtgtttttgatttagcgaggtatttattgtcgtttttattcgggttaaaggttcgttattgttttcgtatgtttaagtgtttgggttcgttttaatgagaatatttattatatgttttaagattttattttttggaatttgtgaggttaagaattttaggttagagaataagaggtttgtcgttattttggaagtggttcgttatttttttgggagttttaaaaataaggatcgttcggtaatattagttagagggattcgtgtgtaattatttattttaatagttatttttttagaggagtaggattattatattatgttttttatgagaagatcgaggtttaaggagttgggttttatattggtagagttatggttttaatttaggtgattattttttaaatttgcgttttttagtattttttcgttatgttgaaattaagaggtagtttttgtatttaagaagtttataattttttatttgaattgtagaggatgtgtgttttattaaacgaatagtagttattttttttttttttttattagataagttttatatttttatattttgataatggttttttttttttttaggtaatttttgatttagttttagttattttattgttatttttgaatttaggatttaggttatatttagaggttttgttgatgtttgtttttttgttaggttgttttttgtttataggtttaaagggaaatttattttttttgtttgaagtgaaggagtaagagaatggttattttatagagtaattttgagggttgttggttgtttatttttgtggttatttttgatgatatgttaaatacggggtggattatttatgttttttcgttttagatatatatgtagggtaattttttgatattgttatggtatttgtaaattgttatgcgttggtgggagtgtaaaaatgaggataattataggttattttcgtggttattttggttgtggtgagttttaattagtttttttattgtaatttgttttatgagtaaggtttttatgatttttatgattttgtgttgattttttattttattttgtgatttagaatgttttattcgtttgggaatgtagtttagtaggtattagtttcgttttattagtttttatttaagatggagttgttgtggtatgtattcggtgtggagttgttttgggtgtatttttgataatagggttttgtttgggaaaaagaatggtagcgttgatggtttagtttttaggttcgatgttttttttagtataaggagtttgggggtttcgagatatttttttttgtatatttgttttgttttaggtttaggtggatttaggtgtttgtggggaaaagtaagagagattagattgttattgtgtttgtgtagaaagaagtagatataggagattttattttgttttgtattaagaaaaatttttttgttttgggatgttgttaatttataattttatttttaattttatgttttttgaaatatgtgttgtgtttatttagggttaaatggattaagggcggtgtaagatgtgttttgttaaatagatgtttgaaggtagtatgttttttaagagttattattacgttttaattttaagtatttagggatataaatattgcggaaggtcgtagggatttttgtttaggaaagttaggtattgtttaaggtttttttttatgtgatagtttgaaatacggtttcgtgggaagggaaagatttgatcgttttttagttcgatatttataaagggtttgtgttgaggaggattaatataagaggaaggtatgttttttgtagttgagataagaggaaggtatttgttttttgttcgtttttgggtaatggaatgtttcggtataaaattcgattgtacgttttatttattgagatagggaaaaattattttaaggttggaggtgggatatgtaggtagt

SEQ ID NO: 2167 - DNA, 6291 bp, Artificial Sequence
  chemically treated genomic DNA (Homo sapiens)
ttttggagacggagtttcgttttgtcgtttaggttggagtgtagtggtatgattttagtttattgtaagtttcgtttttcgggtttacgttatttttttgttttagtttttcgagtagttgggattataggcgttcgttattgcgtttagttaattttttgtatttttagtagagatggggttttattatggtttcgatttgatttcgtgattcgttcgtttttgttttttaaaatgttgggattataggcgtgagttattacgttcggtttgttgttgttgtttttaagaaatagagtttttgttaggtgtggtggtttacgtttgtaaattttagtattttgggaggtcgaggcgggtggattatttgaagttaggagttcgagattagtttagttaatatggttgtttttattaaaatagagaaatattgtttttattaaaaatataaaattagtcgggtatggtggtgggtttttgtaattttagttatttaggaggttgaggtagtagagttggtttagtttaataggcggaggttgtagtgagttaagattatagtattgtgttttagtttgggtgataaagcgagattttattttaaaaaaattaaaaaaaaaaaaatagtatttcgttttgttgtttaagttgtattttagatagtaaaaataaaaataaaaataaaaataaattaggtttttaaagttttattttatgatttggaggaatatataaatgtattgatatattaaggaaagaattaggttttatagttaaatggataagataatttaaaatttattaaattatatagtatatatttatttttttgggagaaaatatgatagttatttattaatttgggggaaagttttaagagttaaattttgtgtgttttttagtttttttttttgtcgttattttttatttttgtgtgaattgttgtttcggttttataagttatcgttttttttagttttagtttttttaatatttttgtaggaatttttagagtttttagtggttttgattttatttagttatagtgttgagttatgtttttttttagggtagaggttagtaaatttttgttttgaagggttggatagtaaatattttaggttttttaggttgtaatattatagtttgtgtttgaattattttattttgtttttgtagtaaaagtagttatagataataaggaaaggagtgtgggtaaggttgttttttagtaaaattttatttataaaaataggtggtgggtttattgtattattttttatttttttatttatttcgtgaacgaatttttttttattttttagaattttttttttttattttttttttttttacgatggagttttattttgtcgtttaggttagaatgtagtggtatgattgcggttcgttataatttttattttttagatttaagcgatttttttggttttagttttttaagtagttgggattataggtatttattatcgtgttcggttaatttttgtatttttagtatagatagggttttattatgttggttaggttggttttgaatttttgattttaagtagtttattcgttttggttttttaaagtgttcggattataagcgtgagcgatcgcgtttggttttagaattttttttagatatttttatttttttaatgtttttttttgttttttaggataattatttttgttgtgtgttttttaattgttgcgttggatttacgtttatatttacgtttgtttgtatattagttttttttgtttggttttgggttttatttttatatttttagttatttttggttgatttatgtcgtatttatggtttttgatttaagtttttaggtgggttggtattagtattttttttttttgtaatttttagaagtaaatgtattttttaggaataaatttggtcgggtatagttatttatttttataattttagtattttagggggtttaggtaggtggattatttgagtttaggagtttgataataatttgggtaatatagtgaggtttttatttttatagaaaatatagaaatattagttagtatgtatcgtggtgtgtatttatagttttagttatttgtgaggtagaggtgagaggattatatgagtttagggagattaagtttgtagtgagtcgtgattatgttaatgtattttagtttgggaagtagagtaagattttgataaaaaaaaaaaaaagaagaagaaattgggcgatttttttttttaggaaaaaaaaaaaaaagggttaggtgtagtggtttatatttgtaattttagtattttgggaagtcgaagtgggtggattataaggttaagagattgagattattttggttaatatggtgaaatttcgtttttattaaaaatataaaaattagttgggtatggtggtgggcgtttgtagttttagttattcgggaggttgaggtaggagaattatttgaattcgggaggtagaggttgtagtgagtcgagattcgttattggattttagtatggtgatagagtgagattttattttaagaaaaaaaaaaaaatgaagagggtgaattttggggagttaaataatttatatacgtggatataatagagtagaatagttattggggattgtagaaggtgatggggggaggagggtgagggtgaataaatttttcgttgggtacgatgtttattatttaggtaatgtgtattttaaaagtttagattggtttggcgtagtggtttatttttgtaattttagtattttgggaggttaaggcgggaggatcgtttgagtttaggagtttaaggttatttagttaatataatgagagtattttggaagttcgaagcgggtggattacgaggttaggagatagagattattttggttaatatggtgaaattttatttttattaaaaatataaaaaaaaattagttaggcgcggtggcgggcgtttgttgttttagttattcgagaggttgaggtaggagaatggcgtgaattcgggaggcggagtttgtagtgagttaagatagcgttattgtagttcggtttgggtgaaaaagcgagattgttttaaaaaaaaaaaaaaaaaaaaggtcgggtgcggtagtttatgtttgtaattttagtattttgggaggtcgaggaggatggattatttgaggttaggagttcgagattagtttggttaatatagtgaaattttgtttatgttaaaaatataaaaaaaattagtcgggcgtggtggcggggtgtttgtaattttagttatttgggaggttgagataggagaatcgtttgaatttaggaggtggaggttgtagtgagtcgatattatgttattgtattagagtttgggtaataaagagcgaaattttattttaaaaaaaaaaaagtttagattttattattatacgatatatgtgtataagaaatttgtatttgtaggttaggcgtggtggtttatttttttaattttagtatttagggaagtcgaggttggtatattatttgaggttaggagtttgagattagtttggttaatatggtaaaattttatttttatttaaaaaaatataaaaattagtcgggtgtggtggcgtatgtttatagttttagttatttaggaggttgaggtagaagaattgtttgaatttaggtagtagaggttgtagtgagtcgagattatattattgtattttagtttgggcgatagtacgagatttttattttaaaaataaaaaaagaaaaagaaaagaaattggtattggtagattgttatttattatttttttggtgtgtttttggtgttattagtttttttatttaagttttttttttggtagaggattttttttagggagttttatcgtattgagaattttttgtggttttggatagttagttttttagtttttttttgttgttcgtgattttggtagttttgggattattagttatatttttgtaggatgtttttagtttgggtttgtttgatgtttttttttttagtagtttggagttgtggttttagaagtaattatattttaggttattttcgagtgtatttttcgtggttttttcggattttatttttttaggttgggttttaaggattttggagttttgggaattttaaattttaggataggtttagttttgtttatttttatatgtttttcgttgttattgttgtgtggttaaggtttgtggggtcgagtcgttttttgtttggggagttgttggggaggtttatttagagatgaggttaggaaggatgtgggttgggaagggtatagtagaaagagggttatggtttgttgggttttaggattgagaggttgtttttggatggggtgggatgggggttgggatggagtaaatttaggggaagggttaggttttggggttgtttgatgatgttatttgtaaaagttattgtatttttttttaagtgatagggttttttttttttatttaggttggagtatagttggtataattatggtttattgtagtttcgattttttgggtttaagtgatttttttattttagttttttgaggagttgggattataggcgagtattattatgtttttattttttgtagagacggggtttcgttatgttgtttaggttggttttaaatttttggttttaagcgatttttttattttggttttttaaagtgttgggattataagtatgagttattgtaggagtttgaggttatattgaaggatagatagatttttacgggatgtcgtgattggttgtttttggttttttgggcgagtttagtcgggtggggaattttagtatcgggttaggtgttatttgtttaggagtgggattttatatgttttttaaatttttttttattattttgattatgtttggttttgattttttttttagttttaggatacgcgcgtttcgagtttgggaggtatgttgaagttaggcggtcggtaggatgagtgtgaaagaggtaggtagttcgggtcgtcgggagtaggcggtttattatttgtatatttatttttagttgtttattatcgagagttaggtttcgtgtcgcgtgattgttattaaggatagtattatttcggacgttattaaggacgttattgttagtttgcggttggacggtattaaatgttatgtgttggtggaggttaaagagtcgggaggcgaggaatgggtgttggacgttaacgattcgtttgtgtatcgggtgttgttatggtttcggcgggtataggacgagtatttttaggaggatggttattattttttgttgtaggagcgtaacgtagatggaattattaagtacgtgtatatgtagttggtggcgtaggttatagttattcggcgtttagtggagcgtggttttttgttacggtagtaggcggattttgatgatttgtgtaattttttcgagttaatcgagggtaattttttgaagaattttaagtatcgttttttgtaataaaagatttatacgtacgcggggagtattttggtggttattaatttttttaagtttttgtttatttataattttaagtacgtgaagatgtatgagaattagtagttgggtaagttggagttatacgttttcgcgttggtcgacgtggtttattatattatgtttaggaagcgcgtgaattagtgtatcgtgatttcgggtgagagcggtttcggtaagatttagagtattaatttttttatttattgttttatcgtttttagttagaagggttacgttagcggcgtcgagaggattattttgggtgttggttttgtgttggaggtgagcggggaagttggtcggtttgtgggagggggtatttgtttggaaaatgcgggttttaggttaagttcggtggtttatatttataattttaatgttttggaaggttgagggaggaggattgtttgagtttaggagtttaagattagtttgggtaatatagtaagattttttttttataaaaaaaaaaaaataattagttaggtaggtatagtagtgtttatttgtagttttagttgtttaggaggttgaggtaggaggattatttgagtttaggagttcgaggttttagtgagttatgattatgttattgtattttagtttggatgatagagagagattttattttaaaaaaaaaaaaagaaagaaattttaggttgggtgtggtggtttatgtttataattttagtggtttttgagaggttgaggtaagaggatcgtttgagtttag

SEQ ID NO: 2168 - DNA, 6291 bp, Artificial Sequence
  chemically treated genomic DNA (Homo sapiens)
ttgggtttaagcgatttttttgttttagttttttaaaaattattggggttatagatatgagttattatatttagtttgaaatttttttttttttttttttttgagatggagtttttttttgttatttaggttggagtgtagtggtatgattatagtttattgaagtttcgaatttttgggtttaagtgatttttttgttttagttttttgagtagttgggattataggtgagtattattatgtttgtttggttaattatttttttttttttgtagagaaaagattttgttatgttgtttaggttgattttgaatttttgggtttaagtaattttttttttttagttttttaaagtattgggattatagatgtgggttatcgagtttggtttgaaattcgtattttttaaataaatgtttttttttatagatcgattagttttttcgtttatttttagtatagggttagtatttaggatggttttttcgacgtcgttggcgtagtttttttggttgagggcggtgaggtagtggatgaggaagttggtgttttgggttttgtcggagtcgtttttattcgagattacgatgtattggtttacgcgttttttgagtatggtgtagtaggttacgtcggttagcgcgaagacgtgtggttttagtttgtttagttgttggtttttatatatttttacgtatttggggttgtagatgggtaggaatttaaaggggttgatggttattaggatgtttttcgcgtacgtgtagattttttgttgtaggaagcggtgtttgaggttttttaggaggttgttttcggttagttcggggaggttatataggttattaaagttcgtttgttgtcgtggtaggaggttacgttttattaggcgtcgggtggttgtggtttgcgttattagttgtatatgtacgtatttgatggttttatttgcgttgcgtttttgtagtaggaagtagtagttatttttttgagggtgttcgttttgtgttcgtcggggttatagtagtattcggtgtataggcgagtcgttggcgtttagtatttatttttcgtttttcgattttttgatttttattagtatataatatttggtgtcgtttagtcgtaggttggtaatggcgtttttgatgacgttcgaggtggtgttgtttttggtggtagttacgcggtacgaggtttggttttcggtggtggatagttgggggtagatgtgtaggtggtaggtcgtttgttttcggcggttcgagttgtttgttttttttatatttattttgtcggtcgtttggttttagtatgttttttaggttcggggcgcgcgtgttttggagttagaagggaggttagagttaggtatggttagaatggtgggaggaagtttaaggggtatgtggagttttatttttgggtagatagtatttgattcgatgttggagttttttattcgattaggttcgtttaaaaagttagaggtaattagttacgatatttcgtgagggtttgtttgttttttaatgtgattttaggtttttgtagtggtttatgtttataattttaatattttaggaggttaaggtgggaggatcgtttgaggttaggagtttgagattagtttgggtaatatagcgagatttcgtttttataaaaaataaaggtatagtggtgttcgtttgtggttttagttttttaggaggttgagatgggaggattatttgaatttaggagatcgaggttgtagtgagttatgattatattagttgtgttttagtttgggtgagagagagagattttgttatttaaaaaaaaatatagtggtttttataagtgatattattagataattttaagatttgattttttttttgagtttgttttattttagtttttattttattttatttagaggtagttttttaattttgaagtttaataagttatgattttttttttgttatgttttttttagtttatattttttttgattttatttttgaataaatttttttagtagttttttaagtagaagacgattcggttttataggttttggttatatagtagtaatagcgagaggtatgtggggatgagtaagattgaatttgttttgaaatttgggatttttaaaattttagggtttttgaaatttaatttaggaagatgaagttcgggagagttacgaaaaatgtattcgggaatggtttagagtgtggttgtttttgaagttataattttagattattggggagaagaatattaggtaggtttaggttgggggtattttgtaggaatatggttggtggttttaagattgttaaggttacgggtaataaggaaagattgaggagttagttgtttaagattataggagatttttaatgcgataggattttttggaaaggattttttattagagagagggtttgaatggaagagttagtgatattagaagtatattaggaaggtggtaagtagtagtttgttaatattaattttttttttttttttttttttgtttttgagataagagtttcgtgttgtcgtttaggttagagtgtagtggtgtgatttcggtttattgtaatttttgttgtttgggtttaagtaatttttttgttttagttttttgagtagttgggattataggtatgcgttattatattcggttaatttttgtatttttttaagtagagatggggttttgttatgttggttaggttggttttaaatttttgattttaggtgatgtgttaatttcgatttttttaagtgttgggattagaggggtgagttattacgtttggtttataagtgtaggttttttatatatatatatcgtgtagtggtgaagtttgggtttttttttttttgagatggagtttcgttttttgttgtttaggttttagtgtagtggtatgatgtcggtttattgtaatttttattttttgggtttaagcgatttttttgttttagttttttaagtagttgggattataggtatttcgttattacgttcggttaattttttttgtatttttagtatagatagggttttattatgttggttaggttggtttcgaatttttgattttaggtgatttatttttttcggttttttaaagtgttgggattatagatatgagttatcgtattcggttttttttttttttttttttttaagatagtttcgtttttttatttaggtcggattgtagtggcgttattttggtttattgtaagtttcgtttttcgggtttacgttatttttttgttttagtttttcgagtagttgagataataggcgttcgttatcgcgtttggttaatttttttttgtatttttagtagagatggagttttattatgttagttaggatggtttttattttttgatttcgtgatttattcgtttcgggtttttaaagtgtttttattatgttggttaggtggttttgaatttttaagtttaaacgattttttcgttttggttttttaaagtgttaggattataggagtgagttattgcgttaggttaatttgggtttttgggatatatattgtttgaatagtgaatatcgtatttaacgggaaatttgtttatttttatttttttttttttattattttttgtagtttttaataattattttgttttgttatgtttacgtatatagattgtttagttttttaaaatttattttttttattttttttttttttttgagatggagttttattttattattatgttggagtttagtggcggatttcggtttattgtaatttttgtttttcgggtttaagtgatttttttgttttagtttttcgagtagttgggattataggcgtttattattatgtttaattaatttttgtatttttagtagagacggggttttattatgttggttaggatggttttaattttttgattttgtgatttatttatttcggttttttaaagtgttgggattataggtgtgagttattgtatttagttttttttttttttttttttaagagagagggtcgtttagttttttttttttttttttttttttgttagggttttgttttattttttaggttggggtgtattggtatgattacggtttattgtagatttgatttttttgggtttatgtgatttttttatttttgttttataagtagttgggattataggtgtatattacgatgtatgttggttaatgtttttgtattttttgtagagatgggggttttattatattgtttaggttgttgttaaatttttgggtttaaatgatttatttgtttaggttttttagagtgttgagattatagggatgagtgattgtgttcggttaagtttatttttaaaaagtgtatttgtttttgaaggttgtaagaaaaagaaatgttggtgttagtttatttaggggtttggattaagagttataaatgcggtatgagttaattaagaatggttgagggtgtgaagatgaggtttaaagttaggtaggagagattggtatgtaaatagacgtgagtgtagacgtgaatttagcgtagtagttaaaagatatatagtaggagtgattattttaaaggataagagaagatattaggggagtaggaatatttaagaggggttttaagattaggcgcggtcgtttacgtttgtaattcgagtattttgggaggttaaggcgggtggattgtttgaggttaggagtttaagattagtttgattaatatggtgaaattttgtttgtattaaaaatataaaaattagtcgggtacggtggtgggtgtttgtaattttagttatttgggaggttgaggttaggagaatcgtttgaatttgggaggtgaaggttgtagcgagtcgtaattatgttattgtattttggtttgggcgatagagtgagattttatcgtgaagaaaaaaaaggtggggggggggggttttgaaggatgaagaggagttcgtttacgaggtgagtagaagaataaaggatggtataataggtttattatttgtttttataaataaagttttattggaaggtagttttgtttatatttttttttttattgtttgtggttgtttttgttataagagtagagtgaaatagtttaggtatagattgtaatattatagtttggaaagtttaaaatatttattatttagttttttaaagtaaaggtttgttgatttttgttttaaagagaagtatgatttagtattgtgattgagtggggttagggttattagaggttttgagaatttttgtagaagtgttagaagggttgaggttgaaagaaacgataatttatgaggtcgaggtaatagtttatatagggatagggagtggcgatagggaagaaggttgggggatatataagatttaatttttaaaatttttttttaggttagtaagtaattgttatgtttttttttagggaaatagatatatattgtatagtttaataaattttggattgttttatttatttagttgtaaaatttaattttttttttgatatgttagtgtatttgtatgtttttttaggttatgagataaagttttgagagtttggtttatttttatttttatttttatttttattatttaagatatagtttgagtaatagggcgagatgttgtttttttttttttaatttttttgaaatggagtttcgttttattatttaggttagagtatagtgttgtgattttggtttattgtaattttcgtttgttgggttgaattaattttattgttttagttttttgagtagttgggattataggggtttattattatgttcggttaattttgtgtttttagtagagatagtgtttttttgttttagtagagatagttatgttgattaggttggtttcgaatttttgattttaagtgatttattcgtttcggttttttaaagtgttgggatttataagcgtgagttattatatttggtagagattttattttttaaaaatagtaataataggtcgggcgtggtggtttacgtttgtaattttagtattttgggaagtagaggcgggcggattacgaggttagatcgagattatggtgaaattttatttttattaaaaatataaaaaattagttgggcgtagtggcgggcgtttgtagttttagttattcgggaggttgaggtaggagaatggcgtgaattcggaaggcggagtttgtagtgagttgagattatgttattgtattttagtttgggcgatagagcgagatttcgtttttaaaa

SEQ ID NO: 2169 - DNA, 37973 bp, Artificial Sequence
  chemically treated genomic DNA (Homo sapiens)
ttttattgtggggagttgttttgcgtattgtggaatgttgaacgttattattggtttttatttttagaggttaggaatattttttagttgtgataattaaaaaagtttttagatattgttaaatgttttttgtagggtagggattattatttgagaaatattgatttggaagagtaaagtgtaaattaggagagatatggatgaaattatttttagatgtaaattgtagttttattaattatggttgtgggtaaattatttttttttagttttatttagtttttttagatataaattgaggatattatatttattaaatgtggttttgaaaaaggttaaaatagtttgggcgcggtggtttatgtttgtaattttagtattttgggaagttgaggcgggtggattatttgaggttaggagttttagattagtttgggtaatatggtgaaatttcgtttttattaaaatataaaaaattatttgggcgtggtggcgtatttgtagttttatttattttggaggttgaggtaggagaattgtttgggttttagaggtagaggttgtagtgagtcgagatcgtgttattgtattatagtttgggttatagtgtaagattttatgttaaaaaaaaaaaaaagaagattaagataaataaagtatgtaaagtattttgtagagtgttgtatatggtaagtatttaaaatatggtagttattaatattgtttagattatagttgatatcgtaagtatttttttatgatcgttatttatttatttaatagatatttattaattggggtttgtgtgttagattataataagttttatttgaatttttttttagatttttatttggtgtatataattattatttgtgtttatttatttattattattttttgttttgagatggatttttatttttgttgtttaggttagagtgtaatgacgcgatttcggtttattgtaatttttgttttttgggtttaagagatttttttgttttagtttttcgattagttgggattataggtatttagtattaagttaggttaagtttttgtatttttagtagagacgggagttttattatgttgtttaggttggttttgaatttttgattttaggtgatttatttatttcggttttttaaattgttgggattagaagtgtgagttattgtgtttggtcgtatttatttttttttttttttttttttttttgagacggagtttcgttttgttgtttaggttggagtgtagtggcgcgatttcggtttattgtaagttttatttttcgggtttacgttatttttttgttttagtttttcgagtagttgggattataggcgttcgttattacgttcggttaattttttgtatttttagtagaggcggggttttattgtgttagttaggatggtttcgattttttgattttatgattcgttcgtttttgttttttaaagtgttgggattataggcgtgagttatcgcgttcggttcgtatttattttttatgaatggtattttttggggagttgggggttttattttgttatttaggttggtatgtaataatattattatggtttatgtggattttaatttttggtttggtgtgattatttcgttttagttttattgagtagttgagattgtaggtatattttattatataggttaatttttttttttttttttttgagatgaagttttgttttgttatttaggttggagtgtaatggtatggttttagtttattgtaatttttgttttttgggtttaagcgattttttttttttagtttttggagtagttgggattataggcgtgcgttattacgttcggttaattttttttgtatttttgtagagacggggttttattatgttggttaggttagttttgaatttttgattttaagtgatttatttgttttcgttttttaaagtgttgggattataggtgtgagttattatatttggtatatattggttaaatttttatttttttttgtagagatggggttttattatgttgtttaggatggtttcgaatttttggttttatgtgattttttaattttggttttttaaagtgttgtgattataggtgtaagttattgtgtttaatttgtgaatggtatttttaatattagtaaaagattttattatatcgatttttatttttggttttgattttttttttgggatttaaatttatatgtttagttggatgtttttttaggaatattaaatttggtatttggggttaattagtttagtgtttagtatttggtaagtttttttataaaaatgagttattattaattattagtgtcgttttttagtttttgttagttgatttatttttttttgttattttttattgggtttttagtgttacgtatttttttttttttttttttttgagacggagtttcgtattttcgtttaggttggagtgtagtggcgttatttcggtttattgtaagtttcgtttttcgggtttacgttatttttttgttttcgtttttcgagtagttgggattataggcgttcgttattacgttcggttaattttttgtatttttagtagagatagggttttatcgtgttagttaggatggtttcgattttttgattttgtgatttgtttgttttttaaagtgttgggattataggcgtgagttattgggttcggttcggtgttacgtatttttattagtagttatttgttgtttttgtggggagtttagaaaatttagttcggtttttttatttgcggggaagaaatgaagtaatgataatgaagatatttttatgttaagtttatattgttttgagtaattagttttggtggggagaatttgttagtagaaggtaggatataaagtttttatagtagttttattgggtgtggtagtaaattatttttgaggtttggtcggtgttattaggtatagtaggggttcgtgtagaagaattagatttattttattaatatatcgttatagtaataatgtttgttgagtatttcggaattgtaatttatattttttgaggttgtagtagggagaatttggaagtagggtagtatagtgttaattagtaggttttgggtgggatagatttgggtttgagttttagttttgttttttattatttgtattatagttagcgagtggttttattatattttttagtatttttatttgtggagttgggggggtgatgttaatgttagttaatatttatggggtgattattgttgttaaaatttagtatatcgggcgcggtggtttacgtttgtaattttagtattttgggaggttaaggtgggtagattatttgaggttagaagtttgagattagtttggttaatatggtgaaatttcgtttttattaaaaatataaaaattagtcgggcgtggtggcgggtgtttgtaattttaattattggggaggttgaggtaggagaattgtttgaattcgggaggcggaggttgtagagagtcgagatcgttttattgtattttagtttgggtaataagagcgaaattttgttttaaaataaaaaataaacgaaaaaatatagtaaattgtttttatttgattattaagagttattttaaaatagaatttattatttaagtatagaaaggtgtaattattttttttatattcgttagaatttttgatgatattaaataaataatatatgaatacggtttaaaaatgggtattatagagtataaaataaagaatgtttttatttttaatttaaatttagtaattttataggatgttaggtttagttttaaagttttatatgtatttagtgcgttgaaatttaataattttacgaggtaggtataattaataataattttaggcggggcgtggtggtttacgtttgtaattttagtatttcgggaggtcgaggcgggcggattatttgaggttcgagattagtttgacgaatatggagaaatttcgtttttaataaaaatataaaattagtcgggcgtggtgacgtatatttgtaattttagttattcgggaggttgacgtcggaaaatcgtttgaattcgggaggcggaggttgtagtgagtcgagatcgcgttattgtattttagtttgggtaataagagcgaaatttcgttttaataataataataattaataataataataataataataataataataattttaaagggaagtagagggatttggcgggaaagtgttagtaaatttaataggtttttataagtgtttttaaagttttataggggtcggtatatgtgattaattgttaaagaagaatattcgtcgtgtgttcgaaacgtagttttttggggcgttatattcggagtttatttgaatcgaagagtttttttttgggttaacgaaggatttaatttttttcgtttcggatttagtttttaagtggtttttcgggtaaggttagtagaggttcgtcgttttaattagttttgttagagtaggtataaaagtatttagagtgattgttattgtagttatttaacgtcgagtttaggtttgttttttttgtagttagagtgaaattttttattggtggagttattttaaaggaggcgggacggagcgggaaagttttgtttattttggtttttttagttaatcgtagtatttatgcgttagttttcggttcggttgcgttgcgcgtagtggtttgggcgatttgagggcggggtcgggagtaggtttcgggttgtggggagggtgcgtttttcgcgggcgcgcggagtgaggacggtgatagttacgcgcgcgcgtacgcgttcgatgtagcgcggtttcgtgattttagtcggtcgttgagaggcgcgcggagtttgggtcgttgtcgtttaggggtttcgtttcgaggcgttttcggtattttcggttcgaatttcggagtgtcgggtcgcgtttgtatcgaaggtttcggtttttgtgttttttttgtagtcgttagggttcgttttttaattttttttttcgtttaggtagggttttcgcggtttatgttggtcgttggggattcgcgtagtttagatcgttttcgggtcgggtagtcggttattatggtggttttgaggtttgtgtagtaattttaggggggttaaagggtttagagtgtaggtcgtggggcgcgagggtttcgggtttgagtttcgcgttatggtcggggttatcgtttttcgtatgagttttagtttttttaagaggaagtaatttaagacgtttatcgtgaggatcgttattatggacgtcgagatggagtttaattgcgaggtaatcggtcggtagtttcgattgttgcggtgatagtcgaggtggaagttcgagaggttttttttatattattttatgggtgtagttagagacgggtagaatcggaagggttaattaggtttaaaattttatgttaaagatgattgttgtttttttttataggatttttgggttttggtattttttgaaggttatttttatttattgttattggaagaagttggatgtttttgtgatagaaaatttaggattttagtgttaggtttaagttaggtttacgtttaaaagtttgaaagtttatttttttattaggtaatattgttatgtatttaggtattagaagttgcgttttgtttattggaaagttaatatttgttttttttttttaaagtttgtatattttgggaaaaaaaattttttgaagaacgatataatattttatatttattttttatatagtttttaatatgatgataatagttattaattgtttagtatttttaaagtgttagatatttgtatatttaatttttagaataaatttatttatttagtaaatggtaaggtggggttttgaattaagtttatagttcgtatagtattgttttttaagtaatttaagtttttgttgttaaaagtgtggtttgtggattagtagtattggtagtagtaagtaagggttggtatgttttttttgtataggattatatagtaaatatttttaattttgtagattagagaatttttgttggagttatttaattttttaattttattattgtaatataaaagtagttttagataagattagtttttagtatgatagtttaaggaatttatttttttgtaaaattggtgaaaatttttttttgttttgtttcgttttgagatagaattttattttgttatcgaggttggtatgtagtagtgtgattatggtttattgtaattttgattaatttttttggtttaattagtttttttgttttagtttttcgagtagttgggattataggcgtgtgttattatatttggttaattttttttttttttttttttttgagacggagtttcgttttgttatttagagtgtatcgggttagagtgtaatggcgcgattttgttttattgttatttttatttttaggtttaagtgatttttttgttttagttttttaggtagttgggattataggcgtgcgttatttcgtttggttaatttttttatttttagtagagatagggttttattatattgggtaggttgatttcgaatttttgatttcgtgattagtcgatttgggttttttaaagtggtgggaaagtggtgcgattatagatgtgagttatttcgtttagttttatttagttaatttttgtaaagatagggttttgttatgttgtttaggttgattttgaatttttgagtttaagtaatttattcgttttggttttttaaagtgatgggattatagatgtagttattacgtttggtttaaaaattttttttttaaaattaattatttaaatttttcggtaatggttttgagggtaaataataaatgaaaaaatatttatttaagaaaatttataaattcggtaagaaagatgagagggtatggtatttgaattaagattattttttttttatttatttttagtttagtgaggtggagtttttattttagattattgtaaattgtaatatcgggtattgtttttttagtttttaattaaatgttttttttttaggaaaagtaggatattagtattttttattttatttagagttatttgttgttgaggttaaaatttgtgtgagtgtaattgaaagttggagtttttttttttttttttttgagacggagttttgtttttgttgtttaaattggagtgtaatggtgtgatttcgttttatcgtagtttttgtttttcgggtttaagcgatttttttatattagttttttaagtagttgggattgtaggtttgcgttattatgtttggttaattttgtatttttagtagaggtagggtttttttatgttggttaggttggttttgaattttttattttaggtgatttatttgtttcggttttttaaagtgttgggattataggcgtgagttattgtgttttgcgaaaagttggagttttttttttttatttagtttttatttgtggaataggattgtattttggatatgatatattgaaattattggtgttttaattgtttattttttagtttttgtaggttgagttttaggttattgcggttttttgtttttttttattaagtgtttagtttttagagtgagggtattttttagagagaatttttttagggtttttttttatagttttagagttttggtttcgggattttgttttaggagagaagtaggttttaaaatagatagtttttaatttttttttaatggtagtgattttatttgtaatatagtgtggagaaatttatgtttaagggtaatttggagatgtgaaggttttggtaagaggtaattgggagatttgcggatttaatggagatgtagtttagattgtaggttttttggtttgttggaaagaattggggaataagatagttggaagaagttattttaggattagaagaaggattaaatattgatcgtagtatggtggtttacgtttgtaattttagtattttgggaggttgaggtaggtagattatttgaggtcgggagtttgagattagtttgattaatatggtgaattttatttttattaaaaatataaaaattagttgggtatgggggtatatatttgtaattttagttatttgggaggttgaagtaggaaaattacgtgaattgggaggtggaagttgtagtgagttaagattacgttattgtattttagtttgggtgatagtgaagttttgttttgttataaaataaaatattgattatagatttttgaggtggtggatgttttttttgttttggttgtattattatatattgtatattaatgtatcgaaatattataggtatttttaatatgtgtataattattatgaattaataaaaaataatttgaaaagtaaggtatgtggtagaggtggaaaaaaatgtttttttttaaatagttataatttgattgtattagtttgtagagtaagagtaagttatgttttagtgtgttgttgaaaataatagaataatatgttataattagtggagttttatagttgggtgtggttaaggagagaatagaagagaattttattaaaattattgttattttagggtgattgtgagtatatttaaagttgtatttttttgaagagtaatattataggttttaatattttttaggggaaatggattttatttaaataatttagttagtcgttaaataaataaataataattggttttggagagggggtattaatttttagagttgttatagtatattatttaaaatgtttagtttttaataagaaattgtgagacgtataaagaaataggaaaatatgatatatatattggaaaaaagttggtagtagtaattgtttgtgagataaggggttaaattaatgaaaaaggttttaaattggtttatatatatatttatagtattatatatatttataatattaaaggaaaatatgatgataaagaagtaaaggatggtatgatattgttgtattaattaaagaatatttataaagatatagaaattataaaaaaagaattaaatgaaaattttggagttgaaagtataataatagttgggcgcggtggtttatatttgtaattttagtattttgggaggttgaggcgggcggattatttgaggtcgggagttcgagattagtttgattaatatggtaaaatttcgtttttgttaaaaatataaaaattagttaggcgtggtggtcggtatttgtagttttagttacgcgggaggttgaggtaggagaattttttgaatttgggaggcggaggttgtagtgagttaagatcgagttattgtatattagtttgggtaatagagtaagattttgttttaaaaaaaaaaaaaaaaaaaaaaaaagtataataataaatttaaaaattaattagagggatttaggatttaataatagatttgaattgggtgaagaaagaattcgttaattttttttttttttttgagatagagtttcgttttgttgtttaggttggagtgtagtggggtaatttcggtttattgtaatttttgtttttttggtttaagcgatttttttgttttagttatcgtatagtggttttgggagtattttgggaggttgaggtgggtggattatttgaggttaggagtttaagattagtttggttaatatggtgaaattttatttttataaaaatataaaaatttagttgggtatgatggcgggtgtttgtaattttagttatttgggaggttgaggcgggagaattgtttgaattcgggaggcggaggttgtagtgagtagagatcgtgttattgttttttaatttgggtgatagagcgagattttatttttgttttgaaaaaaaaaaaaaagatgtgaaatatatataaaaaaaagtaaaatggtagttgaatgttaagtaattagataattttaataaaatggataaatttttagaaagatataaattattaaaattgatttaagaagagatattatttgaatagatttataataagtaaagatattaaattagtaattgaggggattcgtggggtaatttgtttttgggaattagtagtatggtatcgggttgtaagattggtttgtttatttttaatgttatttggttaatttaggggtttagtgtttttggatgttagattttggggtcgattatttttatcggaatgtaatggatgaatatgtatgtgatggtgtttaagttagaatagtgggtaaagttaatggttataagaggagttaattagtatattttttatttcgaggaaattgagaatttaggggttttgattaaagatatttaggagaatgggatgaaggttggttttgttataaaattaggaattttagtttagtatttggtattatgggttaattaattaggtatgattttggttatgatagtggaattagggtttggagggtataaatttatggaagatatgatgttaaaggtttattggttgaggatttagtttttatttttggttatagaggtcgttggtggaatagattttgatattgtttataggtgtgtagaggcgaagttaatatgattgtgtttggtagtgttatggtgaggagtgaagattttagatttgtgattagtttgttaagaaatatttgtttagaagttgtttagaaagatttttttgattgatgaaattttaaggagtttaatgtttgtttatgaaattttttttttattggaaaataggaatattgattattaaattatagtgtagttgaagttattttgcgtttttgagtagttattcgttttagtgattataattgattgtgtagagtattttaagaagttagaaattggtgtgtataattatatttttagtgatgtaatttaatgattagtgagtgagatattgtttttattgagagttttgatttttataaagagtaaaaatatggttgtattaagggtataaatagaaaagtgttttaatgtttaaggagggtatattagttatattataaaaataatttttttttgtatttttgaaaagaattttgttgttttttagttgttttttaaaagtaaaggaagttttaatgtttttttttatttcgtgttatgtgtgatttgtttatatgtttggtaatatgagtttaatggaatttaaaaatataagtttgggtaggatagtatatttttaaaaaataaataaataattagagagagagagagagagagagatttgggtatagtggttgttgtttgtaattttagtattttgggaggttaaggtaggaggattttttgaggttaggagtttgagattaatttgggtaatatagagagattttaattttaaaatatatatattatatttaaatttagttaggcgtggtggtgtgagtttggagttttagttatttaggaggttaaggtgtgaggattatttgattttaggaggttgaggaggtagtgagttatgattgtgttatagtgttttagttagggtgatagagtgagattttgttttttaaaaaaaagaaaagaggttgggtgtagtggtttatgtttgtaattttagtattttgggaagttaaggtgggtagattacgaggttaggagtttaagattagtttgtttaatatggtgaaattttatttttattaaaaatataaaaattagtcgagtatggtggagtgcgtttgtagttttagttattcgagaggttgaggtaggagaatcgtttgaattcgggaagttggaggttgtagtgagttgagattgcgttattgtattttagtttgggtgataaagtgagattttattttaaaaaaaaaaaaaaagaagaaagaaaagtaaagtaaagtttaggtttgtatttattagaggttttgataattttattattgaattttattaaatattttaagaaaaattaatatagttttttataaagtttttaaaaatgaaaaagaggagaaaatatttataaacgaattttatgagattggtattattttgttgttaaaaattaggaaaagatattataagaaaagaaaattatagataaatatattttataaatgtggaagtaaaaatttttaataaaaatattagtaaattgaatttagtaatatataaaaataattatatattataaataagtaggatttattttaggagtgtaaggttggtttaatatttaaaaatgaattagtgtaaataatgtaatgtattatattaatagaataaaaaataaaaattattttgttattttagtagatatagaaaaagtatttgataaaatttagtatgttttttatgataaaaatattaaataaattaagaagagaagagtagttttttaatttgatatatagtagttatgaaaaatttatagttaattttataatagtgagattgaggttaggtatagtggtttacgtttgtaattttaatattttaggaggttaaggttggagggattatttgaggttaggagtttaagaatagtttggttaatatggtgaaattttgtttttattataaatataaaaaaaaattagttaggtgtggtggtgtatatttataattgtagttatttgggaggttgaggtgggaggattgtttgaatttgggaggtagaggttgtagtgagttgagatagtattattgtatataataggttgggcgatagagtttaaaataaataaataaataaataaaatagtgaaagattgtatgtttatttttaagattaggaaaaagagagataagtttatttttattattgttatttagtattgtattggaggttttagttagggtaattaggtaagaaaatgtaataaaatatatttatgttggaagggaataagtaagattatttttgtagatgatatgattttgtatatagattttgaggaatttattattaaagtattggaattaataaattattagtttagtaaggttataggatataagattattatataaaatttagttgtaaatgtatttatttggaatgaataatttgaaaaggaaattaagaaaattttatttataataatttaaaaaataaaaatatttataataaaagaggtatttttttttttattttttgatagtttagtaaaagaaagtataaaatttatattttaaaagttgtaaaatatttttggttttgttttttaaattaattttttttgaaacggagttttattttgtcgtttaggttggaatgcggtggcgcgatttcggtttattgtaatttttgttttttaggttaaagcgatttttttgttttagttttcggagtagttggagttataggtgtgtattattatgtttggttaatttttgtatttttagtatagagggggttttattatgttggttaggttggtttcgaatttttgattttaggtgatttattcgttttagtttttgaaagttttgggattataggcgtgagttagtgcgtttagtttggttttttaaaatatttaattaattgatttttttttttttcggatttgtattgaagtgagaataagtgtagtggtgtaattatattttagtgtagtttagattttttaggtttaagtgatttttttatattagttttttaagtagtttagattataggtatgcgcgattatttttagttttttttttttgtttgtttgttttttaattttttgtagagatagagtttttttgtgttatttaggttggttttgaatttgattttaagtaattttttatgttggttttttaaagtgttgggattataggtgtgagttatcgtgtttggtttgtaaaatatttttaaaagaaagaagatataaataaataaataaatagaaaatagtttttgtttatggattataagatataacgttgttaaattggtagtattttggaaattgatttatacgtttgatataatttttgttagaattttagtttattttattgtagaaattgataagtttttaggcgtagtggtttatgtttgtaattttagtattttgggaggtcgaggtaggcggattatttgaggttaggagtttaagattagtttggttaatatggagaaattttgtttttattaaaattataaaattagtcgggtgtggtggtatatatttgtaattttaggtattcgggaggttgaggtagggaatcgtttgaatttgggaggcggagtttgcggtgagttgagattacgcgttattgtattttagtttgggtaataagagcgaaattttattttaaaaaaaaaaaagaaattgataagttaatttataaatttttatggaatcgtaagggatttataatagttaaattttgaaaaagaataaagtagaaagatttacgttttgtgattttaagatatattataaaataattaattaagataacgttattaggtatcgtggtttatgtttataattttaatattttgggaggttaaggtaggtagattatttgaggataggagttcgagattagtttgggtaatatggcgaaattttgtttttattaaaaatataaaaattaatcgggcgtgggggtgtatatttgtagtttaagttgtttgggagggttgaggtataagaattttttgaatttaggaggtggaggttgtagtgagtcgagatcgtgttattgtattttagtttgggggatagagcgagattttattttaaaaaaataaaaataaaaagatagtgtggtattggtataaggataaatgtgtagattagtggtatagaattgagagtttagaaataaatttagtggaatagagttgagagtttatggttatttgatttttgataagggtgtaaagattatttagtgggggagaattgttttgttttgtttttttttgttatatgttatagattgtgagaaggaatagttttttttttttttttttttttttttttttgagatggagtttcgttttgttatttaggttggagtgtagtggtgtaattttggtttattgtaattttcgttttttgggtttaagtgatttttttgttttagttttttgagtatttggattataggcgtttgttataacgttcggttaatttttgtatttttagtagagatagggttttattatgttggttaggttagtttcgaatttttgatttcgtgatttatttgttttagttttttaaagtgttgggattataggtgtgagttatcgtattcggtcggaatagtttttttaataaatggagttgagataattggatagttatatgtaaaaaaaagaagaaattaaatttttattttatattatatataaaaattaatttatggttgggtacggtggtttatatttgtaattttagtattttgggaggttaaggtaggtggattatgaggttaggagtttaagacgaggttggttaatatggtgaaattttatttttattaaaaatataaaaagtaggtcgggtgcggtggtttaatatttgtaattttagtatttcgggaggtcgaggtgggtggtttacgaggttaggagattaagattattttggttaatatggtgaaattttgtttgtattaaaaatataaaaataaaattagttgggcgtggtggcgggcgtttgtagttttagttatttaggaggttgaggtaggagaatggcgtgaatttaggaggtggagtttgtagtaagtcgagatcgtattattgtatttcggtttgggcgatagagggagattttatttaaaaaaaaaaaaaaaaattagttgggtatggtggcgggtatttgtaattatagttatttgggaggttgaggtaggagaatcgtttgaatttaggggtgagttgagattacgttattgtattttagtttgggtgatagggtgagtttttattttttatttaaaaaaaagtttaaaatggattaaagggttagttgaggtggtttattttagtaatttgagtattttaggatgttgaggtggatggattatttgaggttaggagtttgagattagtttggttaatatggtgaaattttgtttatattaaaaatatagaaattaggttgggtgtggtggtttatgtttgtaattttagtattttgggaggttgaggtaggtggattgtttgaggataggagtttaagattattttggttaatatagtaaaattttatttttattaaaaatataaaaattagttagtcgtggtggtatgtttttgtagtgttatttattttggaggttgagatatgagaattatttgaattcgggaggtggaggttgtagtgagtttagattgtgttattgtattttaatttgggtaataaagtaagattttgtttggaaaaaataaaaataaaaataaaaaataaatgtggagaaatgtgaatttttttatattgttggtaagatcgtaaaatggtgtagttagtttgaaaagtaaattagttagttaggtatggtgggttatatatgtaatttttgtattttgggagattaaggtgggaggattatttgaagttagaattttgagattagtttgggtaatagagtgagattttttttttataaaaaatttaaaaattagttaggcgtggtggtttgtatttgtagttttagttatttgggaggttgaggtgggaggattatttgagtttgggagaggttatagtgaggtatgattgtattattgtatttttagtttggtaattaaagcgagattttgttttaaaaaaaggaagataattagttgggtgtggtagcgtttttttgtagttatagttatttgagaggttaaggtggtaggattttttgagtttagaattttgaggttgtagttagttgtgattgtggtgttatattttaggttgggcgatagagtgagatttagttttaaaaaagataaaaagaaaaatatggtggtagttttttaaatagttaaatatagagttattatataattttataatttaatttatagatgtttttttaagagaaatgaaaatatagttttacgagaaaaatttatatgtgaatgtttatagtagtattatttataatagttagaaggtagaaatagtttaaatatatattagttgatgaatggataaataaaatgtggtttatttttattatggaattatttggtaataaaatagaatgaagtattagtacgtgttttaatatggatggattttgaaaatattatgttatgtgaaagaaattagtcgtaaaagaatatatatgattttatttatatgtaaatttaggataggtatatttatagagataaagtagattagtggttgtttagggttgggaaaaatgggtggggtagagggtgtgatagttgaaatatataaggttttatttatgaagtgatgaaaatattttaaaattgattggtgatggttgtatatattgaatgtattaaaaattattgaattatatattttaaatgggtgaattttagggtatatgaattatatattaagatgtttaaaaaaaattttaggtaaaatgtaaataatgggtatgattgtgttttaagaaaattttatggatatagaaatttgaattttatataatttttataagaaaataaatattaaaaaatgtaatatgttgggtattgtggtttacgtatgtaattttagtatttcgggaggtcgaggtggacggatgacgaggttaggagttttatattagtttggttaatatgtaaaattttgtttttattgaaaatagaaaaattagttgggcgtgatggtatacgtttgtaattttagttattcgggaggttgaggtaggagaattatttgaatttggaaggcggaggttgtggtgagttgagattacgtcgttgtattttagtttgggtaataagagtgaaatttcgttttaagaaaaaaaaaaaaaaaaagtaaaaattatttttagtttttaggttatataaaaataggtggtgggttggatttgttttgtgggttatagtttgttgatttttgatttaagttattatttgatagatgttagatgttgtgagagggtaagagagattagtttataaggaaagggattttagttttttgggggtttttttttttgagacggagtttcgttttgtcgtttaggttggaaagtaatggtgtgattttagtttattgtaatttttgttatttaggtttaagcgatttttttgttttagttttttaagtagttgggattataggtatgtgttattatgttcggttaatttttgtatttttagtagagatgggtttttattatgttggttaggttgattttgaatttttgattttaggtgattcgttttttttggttttttaaagtgttgggattataggtgtgaattattgtgtttatttaggaaagggattttgtatgatattttttagtcgtaattttgttaggaaaagtttttttttttttattaagtagattttagatttaaagatgttggatagtattattagttagagtaaggttttttaattttggtattattgatattttggttggatgattttttgttgtggggagttgttttgtatgttttaggatgtttagtaggatttttggtttttatttattagatgttagtagtatttttttattttattttagttgttgtgataattaaaaatgtttttagatattgttaagtgtttttggggtagggaggatattttttaattttttttttttttttatttaatttttatgattatattgagaattattgatttatagaaaaggataatagtagtgatatttagagaggtaggatggtatagtgtaaagtttgttaaattttaattttatataaatgatttggggaattttggaaaaatgtaggttttgatttagtagttttgggatggaagtgagaattttgtattaataataaatttttaggtgatgatatttgtgttatcggtttaaggattatattttgaatagtagagtagtagtagaaagtgtatcggttttgaaagaagatagatttgggtttgaattttagttaaaatatttttattttggataagttatatagttttttggattttatttttttattggtaaaatgagattaataatgttgattttgtagagtttttataaggatttatggaatgtatagtttttggtagaaaggaagatataggagggattataattggtttaaagtaggaggttttggttattatgggtattgttttgttgtgatttattaagttattatattttattgaattttagatttttagtggaaaaatttgtttgtaaattatgtttatatattttgttgaaagtaattatagtttgatttatgatgatagggtttaggtaagtgattagttttatttttttgtttgttttttatgttgtttattaatgagtaaggtgttgatgtaaggagatggtagatgtattttgaaaaaaaaggagagagagagtatttgtagaatttttgattttattgaggttaaatgtaggtggttttttaagaaggatttaattttagaatcggtggtatttaatatatgagttatgttattttatgttaataagtttagattttttttttttttattgtagagatagggggaaaaattttttgtattatttgttgtattgtttaattggttggatgttttggaagatttttttatttgaaagatttgttgtttgttattttgagaaagtgggtgttgagtgtaatttgttaggaggttaaacggttatgttattttttatttaggttggaattttattttaataatttaatttattagtaagaaaagttaaataggaagttgtaagagattttaatattattttatattgaaaataaagttttttttttttgttgtttggtattttaaatgtttttatatatttaagtgagattatgattgtattaaatattaatattgtagattattttagtatataagtggacgtaagttgtttataatagaaggaattttttaaaggggaagatagatagaataattttggtatttttagtaaaattttaaattttaggttttttaggattaggtaaattattttttttaaggatgtaaattttggagggtagtgtagttgtatagggtaatagttttatattttatattagtgtaataagaaatttttatttttgttttagaagtaagattgttatttatttttttttttttgagatggagttttatttttgttgtttagattggagtgtatgattttagtttattaaaatttttgttttttgggtttaagtgattttttagttttagtttttcgaatagttgggaatataggtatgtgttaatacgttttgttaatttttagatttttagtaaagatagggtttttttatgttggttatgttggtttcgaatttttgattttaggtgatttatttgttttggttttttaaagtgttgggattataggtacgagttattacgtttggtttgttatttatttttttatcgttgtgtttttttatgggttttttttgtttgtttgtttgtttgtttgttttgagatggagtttcgttttgttgtttaggttggagtgtagtggcgtgattttagtttattttaatttttgttttttgggtttaagtaatttttttgttttaattttttgagtagttggaattataggtgtttgttattatgttaggttaatttttgtatttttagtagagatggggttttattatgttggttaggttggttttgaatttttgattttatgatttgtttggttcggttttttaaagtgttgggattataggtatgagttatcgtgttcgattttttttatgggttttaagtagtgtttatggatggtatgggtgttattatttaggtttaggataggtaggggtgagtgatgagtgcgtgcgtgttgatgaaggggtgcgaagaaatagatgttggttagtgttgttttttattggattttattttgtttttgtgtgggataaagggttagggattagtagttattttgtgttaggtattatgttaaatgttttaaatgtatattattttatttgatataatagggatttatttatttatttaagagatattataaaataggttaggtatagtggttgatatttgtaattttagtgggaggtcggggtggttagattatttgaggttaggagttcgagattagtttgggtatatggtgaaattttgtttttattgaaaatataaaaattagttaggcgtggtagtgggcgtttgtagttttagttatttcggaggttgaggtaggagaattgtttgaatttgggaggtgagggttgtagtgagttgagatcgcgttattgtattttagtttgggcgataagagcgagattttgttttaaaaaaaagataataattaggcgtggttgtgcgtatttgtagttttaattatttggtaggttgagataagaggattatttgagtttaggagttcgaggttgtagtgagttatgttcgtattattgtatgaagtttgggtgatagagtgagattttgttttttttatttatttgttttttaaataatagagatagggttggtcgggtatggtggtttatttttgtaattttagtattttgggaggttgaggtaggtggatttttgaggttaggagtttaagattagtttggttaatatgggaaaaattcgtttttattaaaaatagaaaaattagtcgggggtaatggtatgtgtttgtaattttagttatttgggaggttgaggtaggataattgtttgaggtggaggttgtttgagattgagttattgtattttagtttggatgatagggagagatttcgattttaaaaaaaaaaatagagatgggggtttttttacgttggttgtttaggttggttttaaatttttgtgtttaagggatttttttgttttagttttttaaagtgttaggattataggtgtgaattattatacgtagttttgatttattgggtgtttacgttgattaggtagggaatattttttagtagtgattaaggattattttggatttaggttttgtaattgattttatttttaagtggggaaatagaggtttagataggatatatagtatgtttaaaggtttagtgtagttattatttattttgaaagaggtagaataggatagggataggtaggtagtgagagaatagggagaatagatgggtatattttttaatttaatatcgattagtaaagtttgtagttgtttatttgaattttatattgaggttgatatgtaagttgagtaaattttaatttaagttttagtttttttgttggggtcgttgaggtagtatagtttagagattataagtatagattttagagtttgatttttggttttgtttttaattagttttgtaattttaaagttttttaatttttttatatgtttttgttttttaattgtaaaatggtgaatgtaattaattttttttgtatagtgttataagaattaaatttgagtaattattggtaaagtacgtagaatagtatttaatataagataagtgttatatataatggttgttatttaaagaaataatagtttgggtaatatggcgaaattttatttttataaaaaatataaaaattagtcggttgtggtggtgtgtatttgtggttttagtatttcgggaggttgaggtgggaggattatatgagtttgggaggtcgaggttgttataagttttttgattgtattattgtattttagtttgggtgatagagtgagattttgttttaaaaaataaataaataaaataaattaaaaaaataaaaaggaaataagtttagtgtttgtcgttagtttgtttttttttttagttttttttttatttttttacgtatttttttgttttgagtttattattttggttttttttttatattgttatatttttgtataggttgttttttttgtttggaatgttatttttatttgttgtttggtagaattgaatttattttttttttaggttttgtttaagggtttttttttttttgtgtttaaagttattatatagtttttaagtgatgggattgagatttgaagttaggttatttgttttttaggttagttttttttttattattttatgttatttaaataggaagcgtaaaagagaagtaggagagaaaaagttagaaatttggagagaatttaggtatttggtaaataggaaaaagaaagtggaaagaagagattatttgaaggatttttttaatttaataattatttgtttatggtattattttattgtatttggtgtatgatattattttaaaagtattttgtaaatttgttagtggtttatatttttgtcggatgaatgatatgattaacgattcgtgttatattattttagtgtttagtttgttattttgaattaagtggatattttttgtaagtgaattatttttatttgtttatgatataatgagaattttttatttttggtttaaaatgaggtttatgttataatagttaagtattgtttagttgtatatttaatatagttagaatgtttttgtttgtatttagtttggtgttttataatatttggtatgtttatttagatagtaattggtaatatttttattttgagatttttttatgtatggattttgaaaagttagttaattgtttagacgatattgtttttttgatttttataattcgttttttttttattgatagtttagttttggaagattttgtatttttttttttttttttttttttttttgagatagagattcgttttgtcgtttaggttggagtgtagtggcgtgatttttgtttattgtaatttttatttttcgggtttaagtaatttttttgttttagttttttgagtagttgggattatgggtgtgtattattatatatggttaatttttgtatttttagtagagacgaagttttattatgttggttaggacggtttcgattttttgattttgtgattagtttgtttcggttttttaaagtgttgggattataggcgtgaattatcgtgttcggttttttttttttttttttttttttcgagatggggttttatttagattggagtgtagtggtgttattatagtttattatagatttgatttgttgggtttaagtgatttttttgtttaagttttttaagtagttgggattataggtatatgttattaatatttggttaatttttttgaagaaatgggatttcgttatgttgtttaggttggtttggaatttttgggtttaagcgattttttcgttttagttttttaaagtgttgggattataggtatgagttaatatgtttagttagagatgtgtgtgaattggtagttttaagttagatattggaggtttatgaagtttaggttaaagaggtttgtatttattagatgcgatgaagagttttgaagtttttattagaagtgtgatttaaagtggttggtatgtaaaatgatttggaacgtttggggtttggggtagggagagagaggttggaagtaggaaataattagaaggtaaacgttttgggtaaggtattatattgaaatttgaatagtagtgggatttgttgggggttgggataaaattaggtagatgtaagtatttagtgaatttagagattagggtgttttgtgattaagaatgagtagaagatttgttaggtttaagatttaggagatttttaggtttaaagttagtttttagttttcgaagttagttaggtagaagggaagttggattaagttggttagagttgagtttaggaagttagtgtatttttttttgtttggtttttgtatcgttttatttgtgtaaaattattaagatttttaaatcgatgtttgaatattaggtttttaggtagagttttatcgtgtgattttgggcgtattatttattttttttaggttttagtttttttgaaagatgaggggaagaatttatatttaaaggtttttagttttagcgttttattttaggtgatttgggtagaagagttttattgtgttttttttttttttatattttttgttttggtaggaagttattttaagatttgagtgtataggtatgaggaagtttgttagaggataggaagaatattgtttaaagaataagagttatagttttgatggaaggggtaaattggtttgggaaaagttttgtttttgttatttgttttttaagtgattttgaatttaattttttaaattttagttgttgtatttataaaatgagaataatagtattttttttatagggttttttttgttttgtttgtttgtttttagacggaatttttttttgttgtttaggttggagtgtagtggtacgatttcggtttattgtaatttttgtttttcgggtttaagcgattttcgtgttttagttttttgagtagttgggattataggagtgtattattacgtttagttaatttttgtatttttagtagagatggggttttgttatgttggttaggttggtttggaatttttaattttaagtgatttttttgttttgatttttttaagtgttaggattataggtgtgagttaacgtgtttggttagggttgttttgagatatgaatgaggtggatttttataggtatttggtttagggtttgattcgtagtgagtatttgataaatgttatttatttatgttgttatgggttgggagtgtgggaataggaagtgttttatgttagaagtattgtgaatttttttttttaattattgtttttattttttttgaattttatttagattgtttatgtttttgtaattgtagattttttaaattataattagtttaaataaaatggatttattttatgttatgtttttgttgaagggtttttttttttttttttttttttttttttttttttttttttttttttttttttttttttttttttttttttttttttttttttttttttttgttttttttttttttttttttttttttttttttttttttttttttttttttttttttttttttttttttttttttttgttttattgttaggttggagtgtagtggtgagatttcggtttattgtaattttcgtttttgttttttaggtttaagcgattttttttttttagtttttcgagaagttgggattataggcgtgcgttattaatttttgtatttttaggagagacggggttttattatgttggttaggatggtttcgattttttgatttcgtgatttacgtttttcggttttttaaagtgttgggattataggtacgagttattgtattcggttagatttttttttttgtaatatgttaagtaatataatttttatttagtttgatgtttacggtgatagtaggatttttttcggatttttgttatagttaattattttgtatttttttgtttttagtgtgttatattgaaattttttttttttttttgtttttgatgatttttttagttatttatgttagttttgtatttttgtttaagaatatttttgttgtttgtttatttttaattttataaattaaagcgtttgaggttttaaaaatttagaattgagtttttttagagttgttaatttttttagttagttggtgacgaggttttttaatttttgttataggatgatgtgttttgtttttttgtttgtgttttgtttaatttagattttaaatttatatgtttaggatatttttagcgtgttaaaatttattattaaagtagtgttgattttagggaaaaatttttaatggaatttttagttatttatgttgatataaggtgtttgttttagtgtaggaatttgtgtggtattattaggtggtgttagattgtattatttttaaagatagtttttttttttttaatttttttgttattgtttttttttttgtttttttgttaaatttggatcgagttttgaaaattttatataaatttttttttagtgagttatgttgtttatagtttttttttttattttgtttgttttagtttttttgttttaatagttttgatagtttgatatttagataaaatttaaaattgaagtttaaagtaattattaaatgtatttcgattgatttgtggttttaaatttattaatagtgtatttttttatttgtttaattatattgattttgagattaaattagttttataaatatgttagtttttagtttacggtagtttttatttatttgtagattttttttttttttttttttgagatggagtttaattttgttattaggttggagtatagtggcgttattttagtttatggtaatttttgttttttgggtttaagcgatttttttgttttagtttttcgagtagttgggattataggtgtttgttattacgtttagttaatttttgtatttttagtagagatagggttttattatgttggttaggatggtttcgattttttgatttcgtgatttattcgtttcggttttttaaagtgttgggattatatgtgcgagttattacgtttagttttatttgtagatatttttattagttttatttatttatgtttgtattttttaatgttattaaagttagttttattattattgatgattatgagatttaattaaaaggttaagttagaaatagagaatatttaaaatttttttttaggtaaatatttgggtttaatagaagttagtttatatgaatggattatgttttagttttgttgtgttggagtttttttgaaggaatgtattgttatatattaattataatttttatattgtttagggtaggagtaattagttggttgatatttagttaggggttgtgtttcgtaatttgttagttgtatttgatgtttaggtatttgaaatttaattttgtgttttatttgtgttgaatttattattgttttttatttgtagtgttttgtaaaattatttttagtatattatatatttgtaattattgttaattattgaatattaataatatgttaggtgataagaatttttattttttagtagtattattatttttaattttattatattagagagtttattattatatagttaatttatgattattaggagtaaggaacgtaatagtagattttgaatgagggaaaagaatgtgaaattatatataaattaaaggtgaagttatttatatttttgaaaatgattttaagatatagaatgagatgttaaaggattaaaagaaaattatcgtagtaatgaaaaatgttatatggtttatataaagttatgttaagtttatagatttagagagtggtgttaattttgaagattatttgatgattatggaagtcgagatttaaagaggttaagtgatttatttagtatagcgggtttgggtgttttatagttgtttgattatatgagttatgattgtttttatgttgtgagttaaattttaaagatattgtcgtgtttgtttttgtggggattgtattgtttttatagtatgatggttgtattgtttttttttgttttgttatttgttagttaattttgaagtgaattttttttgtttatagtatagtaaaatatggtgattgtatggtttataagagatttataaatgaagaaattgaggttcggttgagttgtatggtatatttaagttatagatttgtgtgtggttgaggtagagaatttaggatatagatttttttgttgggtttttttcgtttttataattgttttgtattttagcgggaaagatgttagaaattgtaagtataaggttttttttttttttaaaaaattgtaatttatttggttttgaaagatttattagagtttaaaagttttattttgtggttttttaaggtgttgtgatttgttttttattagttttttttgttttgtggaaaatttttttttttggttgtttgagatttagatttttttgttaaggtatttttagagagaggaaattagtatgttttattaaaggggtaaaatatatattttaaggtttaattatgtaattatatttttaataacgagtgttataaatttttgttttattgtaattattaattggaagattgttttgtttagaagttttatttagttattatgattattattaatatcgttaattaattataagtattaagtatttatggagtatttatagattatgtagtatttgttagggttttgggagatttaatttgtgtgtgtgtgtgtgtgtgtgtgtgtgtgtgtgtgtgtgtgtgtatatttttgtttttaaggagtttgtgatttgtagaattggaggaaagatagaaaatttggggaaagataagtattttattttttaatatgtgtaaagtttatattgatttatgtatgtggtattgggggatatggatagtagggagataaagggatagattttagaaaggtttagttataaataaatggaagtatataagtttgttgatatgggaggatataggttgggttgtaataaggtagggtaattggttgaaggagggaggaagaaattggtgaagagttgaaggtagtaattaaatagatttggtataataatagagatgattggagaattgggagaagaaaattatttgttgtagttgattatggtagaaattgatagggtaagagattatagttgggattttttgtaaagaggagtttttaagtttgtgatatttttttttttttttttttttttttgagatagttttgttttgttattttagttggagtgtagtggcgtgattttggtttattgtaatttttgttttttaagtttaagcgatttttttgttttagttttttaagtagttgggattataggtatgcgttattacgtttaattagtttttgtatttttagtagagacggggttttattatgttggttaggttggtttcgaatttttgattttaggtgatttatttgtttcggttttttaaagtgttggagttataggtatgagttattgcgtttggtttttaagtttgtgagattttgtttagatttaaatgaaggatgtggggtttaggattggtatagtagaggaaaaaagtttttttttttttttatttttttttttttgttgtgatttatttttttttttatattttttataggtgttgttttgtgatttatttttatttggtggattttttttttttttatgttgagaataatggttgaggtgtggtgtattttttaattttgaaaggaaacggtatgatggttttgcggtttaattatgagatataagaatagtttttgttgtgtggtgatattatattttgaattgagattattagtgttagatatatattattgtatttttttatttttttcgtttaattaaaatagattttaatggaatttattatttatttattgtatagtaaaattatttttataattttttattgtgttttttttgtaaattgaggtatttggtttttattttttaaaatagataaaagttgtatttaggttaggtttggatttggtatattagtattttaaatttttaagttttttataaatttgtttttttaggttagttatggttgtagaagttagttatagataaatattgagaggggagattatattattttttgttttttatttttgaaataacggtagatacgtggtatatgttttgagtttggggtggtgtcgttttttttgttgttttatttgtatgggagttaattttttgataatttttatggtaaatgttagggtagtttgtgagttaattagaagaaattgataagtgaatgttgagtttgtcgatttttttttattttttgtagaggagatagtcgttgaaacggtatttttcgtgtggttgataatttagtttattagatttttatgaaagggaatattgttttttttttagttttttttatattttagtattttttttaaagttaatatttttttataggttttaatatttaggtattttatatatagtagttaaatttagtttattttttttaagaaagttgttttttttaaattgtggtttttttttgttatgggtttggttttttatttatttcgtattgttgtattagtaggtattaggatttgattgttgatgattgtatgttttaaagaaaatagtgggagaaatgtagttgttaaagtaaaaaataaatagtagttttaaggttgagttttaatttggttagttgtaagatggttgtttagtagatgttatttttaatgtttttttggttaatagaatttaattagttttgtaggttattggtgttggttgttttttataatagaaaagtattgtattttagttacgtttttgttgtggaatataagtgtttagtgttatttatttaaaatattttaggttgataaattataagttttttattttgggtaaagtttataaatttagtttttataaaaaaaatagtaagttgatagtatttagttttgtttataaagtttatatatatttatttatgatataggtataagtatatatttatgaaatagtattgtagtttgttaaagtaatgggtgagtatagttataaaggcgagaagtattcgatttttagattttttttattagtttttatgtttgaagggtattttgaggaggaggtttgtggaagggagtttttaggtattggagtttatatttgtgtttttttttttttttttttttttcgtaagttattttttttacgttttttatttttttttttttttttgtaaaatgagtatttgttttttagttttttttttcgttattaggttgagatgaggtagggaatcgtggtggatttagagtagtttgaatattttggttgcgtggaaagcgatggggttaaatgagtatttaattagaattaggagttgtttttttggtaatttgttgaggaaaaatgataaattttaataaaaaggtttttaagtggtacgagtgtagggtttgaaagcgttacgtgttattagttatttaaaaagaatattttttaattagaaaataaatatgagatttattttattagttttaggtttttggagttttataggtattgttgtaggatgtattattgtttcgaattagtgattgaataatttagtttttaattagcgtggagagttagaattgttatacgtattgggttgaagttgtatatttagtattgtattgaatatttagtattgtagataggataattatgttgtttgttagatattagaaaagtgtaaagaatatttttttattttgtaatagtttggatttaagtggtagatttgttgtttttttaggttggcgtgatttttttattgttagtttttttattatagtttaattatttttttggtttttaagatatagtttaaatagtatttttttttaggaaagattttattttcggagatttaggttcgagttgtgttgttattgtattttgttttgttagtatttattaggttgtatttttgtgatttatttatttgttttttttgttagatatgaatagggatagtgttttgtttttaatttattattttttttttgttttgagtataatgattaggacgtagtggatgtttaataaaggtttgttaaatgattgatagtatggttagtttagtgagaattgatggtgttttttgtgatttgttatttattatttttggtgtgaagtagggttgggaggttttaaatagtgttatttgagaatttaaggagaggtggtagagttataattaataataattattttttattgagtatttatttgttatgggttaagtatttttttagggtttttaaatgaattaatgtatttaatttttagattaatttgttaagacgagttttgtttattattttttttgtaaagtataaggaagtttagttatttgtttaaggttatatagtgatagtgtagagatttatattaatggagataattattatttatttatattttttttagattagtttttggaaagattaagtttttatgttttgaggtatttattttaggtaataatttaattttttttttgtttttagaatggtattagtgtgttttttatttgggagaatggagaaaatggttattagataattttttgtgttttttggtttagatgagataggtagagttagttgataaagaattgattttatgtatttatttttattttgttttttttgtttttgattttagatggtagtttcggtttttttggaaatatagtattattttttagttagattgaattattttatttttattttttgtaaggacgattgattttttttttgtttttagatttgtgtatatgttattttttttgtttggaatatatttatttgtttgtttttttttttttaagtttagtttttatttggttttttttttttattatgagttagtttagatgttatttttttatttgtttaggataggaggtttttatagtcgttgggtgttttgttgtggtatttataagtgttatagtgttgaaagtttatttttggggtttttatgtgtgcgatgaaggaggtgattatttttttttagttagtttatattttagttttttgagtgtagagatttgtttttttttttttatttgttttttgtattttgggcggtgtttggatataatgtgtgtgtttattaattatttgtggaagaggtgggtgagcgggagttaattggttttaagtttttgagttttgggtttttgaagtagttaagttcgtttatagttcgttttgtggatagttattgtttgttatgttttgtatgtatatatttgtttgggtattgtggggagtagaaagaggattaatattgtttttgtgttgaggtatttatagtttcgggagatgtttagaggatagtgagttattttatagtattagtatggtatagtggatgagtgatgatattgaagatgagtttggttatattttggtaagttggttgatatttggaagtttcgtttatattttaagatttttttttttagggtgttttgagaattatttagagtaattgtgattaatggcgtttgtttttaaagaagtagaaatttaaattaggaagattgagtaaattttatgtatttggggaagggtttgttggaaagtggaatttgatgtaggtagtaatatgttgaggttagatttaattaaatagaaagattttttaattgtttaaagataaaattttattttataagtggaattagggttttaaattaaatatgtttgaacgtttttatttggtttttttaggtatttttatttattttgtttaaaatttaattgttggtttatttttgttagatttgttgtttttttttgattttattttttttttagtggaattatttggtatttaagttagatatataggtgttttttttaattttgttttttttggttttgtttaggtatttgttttgtgattttgtttttttttcgttttttaggttgtttttttttttttttattgttttttttatgttaggggttggtttattttttggtttttttgatttagggttttttttgtttaatttatattttattttgttgttagagtttatttagattgtagattggagtttatgattcgtttgtttaagggtttttaaagattttgtagtttttggttgaagttgagttatttggttttaaatggagttttattttcgttatgttattttttgtttgtttaagttttataagatgatttgtagttttttgtagaaagtatgatttttaaaaaaagatttattttttttttttttgtatttaatttttatttgttttttaaagttttttttgatttaggttttgtttgttttttttgtagaatattgtttttattattttgtagtattagtgtttaatattggttggtatgtagggtgtgttttataatttttgttgaaagaataagtgggaggtaatagaggtttaatttatattgagttgtaaacgagtaatatttgatttttttgagaatggattttgttttaaatattggttatttattggaaaaggtgtttggggagtgttggatagtaagaataaagggattttatagaataggaaaagaggtattttagggtttgcggtttgtttatgttagattatcgtgaaaaaggttagtgtatgttttggtagttggtaaagaattttgtgatttagtttttttatttgtataaaaagggtatgagtttatattaggtaattatttatgtttatttttaatttttgatagtttacgattttttgtgttaaagttaaaaatttaagtagggtattttgaattggtgttagagttgatgtattttttattgtattgtaagtgttaaggggataaatatattgtttttttgtatttaataaagatagttttgtattttaaaaataaagtagaagggaatataggaaaattgtattaatataattttatgttggagaatttaaatttttatgttaggaaatttatttattatttttttggtagtttttgtttttttgtattgtatattttatttatagatagtttttttttgttaaagtttagtttagttatgattatgagttatggtagattgggaatcgttattttgatttttttaatttttgggtgtttattttttttaagttaatgtttgttttttaatgttatattattttgtagtaaggtagttatttataatttatatattagagttgttttaaaatagagataagaggataattagtattttgaaatttttagttttttaaaataatatttttttagtgaagtttgtttgtaggaattaaaatttttggtgaattaaaaagttttttgttttattgttagattgggaaatggatgtgtttattatttagttttaaaaacgaggaaggagattatttgttaaaaataaaatttattatttttttttattttttttaaaataatttttaaagattttaatttttatagtgttttagtggttttattatagttagagaggagatagggtagaagttgaaggatagataggagaaacggttttgttaaaagataaaagttagtatgtattttagttatttgtttgttgtggttttgatatttttttatttaggttgttgttttgtttgattttgattgtaaatatagagaagggatgggtttttttgttgagtattttgtagagaatttattgtttatttatatgtgttaaaaatgaaaagtttatttgaaaatttttttgtagaattaggttttagtaaaaattaattaggtattagaggtttaatttatttttttttttttggttttatagtaagtttttaaattttaagattttttgtttgtttgtttgagatggagttttgttttgtcgttaggttggagtgtagtggtatgatttcggtttattgtaattttcgtttttcggtttcgagtgatttttttgttttagtttttcgagtagttgggattataggtatgcgttattatatttggttaattttttagtattttattagagatagggttttattatgttggttaggatggtttcgattttttgattttatgattcgtttgttttagttttttaaagtgttgggattataggtgtgaattattacgttcggttgtttaagaattttttttatttttttttattatatatatttttagtgtgttaagattttgagtggagatttttaatgagggtaggaagggacggatgtttttgtaattgagtggttttattttttttatgtttgtcgaaagattatttttttatgattattatttttatgatgtattttatatgattttaatgtattcgagtttgtatttgaatgtttatttgatatttaggggtggttggggtaaggagggggtaagtagtaattaaggggttgtatgggaatattttggtggtttaatttgaaagttattaggtggtaatatttattaagttgttagttattttttttttttaagatattgaatttgtttttttatatagtagatggaatagttgagaaaagagattgttattgttttaggtttttttgaaagtgaggttataggataaatatattatagtatattgatatttattcgttatttgggtttagatattaggagtttgaatttgttttgggtgattgggtgagtagttttttttttggttttagttaggtatttttgataggatagatttgtgattggattgtttggttttttatggttttttttttttatgatttatgattttgattatgatttttttatattaaaaaaaaatttgtagtaaaattagttttatttaaaggaatattagttttttattaaagggtaaagtaatgatttaaaaaaaaaattaataataaaattttaagggaatgaatgtttttagaagttagttattttttcgagttaatttaagaggttagatttttttaaatgaggatgtttatttattagtttttttaaattagtagttttggagatgttaaaattcgtaaggaattgtttaagggatgtattgtgtatgttttgtagtgattaagttattaagttttaattggtatttttttatttatgggtttgtaaaggaagttttaaaattatttaggaatttagtttttattagttgttttagtgttatttttacgttttggaatttgagagtggagagtgtagagaaaaggttttattaatgatttttgtttatagtgtttttttttattggtttgttattgtaga

SEQ ID NO: 2170 - DNA, 37973 bp, Artificial Sequence
  chemically treated genomic DNA (Homo sapiens)
tttgtaataataaattaatggggaaggatattgtgagtaaaaattattaataaaattttttttttgtattttttatttttaggttttaaaacgtggggatgatattaagatagttgatgaggattgaatttttaaataattttaaagttttttttataaatttatgagtgggaaaatattaattagagtttaatggtttaattattgtaaagtatatataatatattttttggatagttttttacggattttaatatttttaaagttgttaatttaggaaagttggtaaataagtatttttatttaggagagtttagttttttaagttaattcggggagatggttagtttttagggatatttatttttttgaaattttgttgttgattttttttttaaattattattttgttttttgataaaaggttagtatttttttaaataagattggttttattataagtttttttttaatataaagaaattataattaaagttataaattatggagaaaaagaattatgagagattagatagtttaattataggtttgttttgttaaggatgtttaattgaggttaaaggggaagttatttatttagttatttagagtaaatttaaatttttggtatttaaatttaggtgacgaatagatattaatatattgtagtgtgtttattttatagttttatttttaaaagaatttgaagtaatggtaatttttttttttagttattttatttgttatgtggaaaagtaagtttaatgttttaagggaagagaatggttggtaatttagtaaatgttgttatttagtggtttttaagttaaattattaggatgtttttatataattttttagttgttgtttgttttttttttgttttaattatttttaaatattagatggatatttaaatataaattcgagtgtattaggattatatgagatgtattatagaaatggtggttatgaaagagtaatttttcgatagatatgggaaaaatgagattatttaattgtagaagtattcgtttttttttgtttttattagaaatttttatttaaagttttggtatattgaagatgtatataatgaaaaggaatgaaaaaaatttttaggtagtcgggcgtggtggtttatatttgtaattttagtattttgggaggttgaggtaggcgaattatgaggttaggagatcgagattattttggttaatatggtgaaattttgtttttagtaaaatattaaaaaattagttaggtgtggtagcgtatgtttgtagttttagttattcgggaggttgaggtaggggaattattcgaaatcgggaggcggaggttgtagtgagtcgagattatgttattgtattttagtttggcgataaagtaagattttattttaaataaataaataaaaaattttagggtttagagatttgttataaaattaagaagggaaaaataagttagatttttgatatttgattggtttttgttaaaatttgattttataggggagtttttaagtaggttttttatttttaatatatatgaatgaatagtgggttttttataaggtatttaataggaaagtttattttttttttgtgtttgtagttaaagttaagtaaagtagtaatttagatggaagaatattaggattatagtagataagtagttgagatgtatattggtttttattttttagtagggtcgttttttttatttgttttttaatttttgttttgttttttttttgattatagtggggttattggaatattataaagattgaggtttttagggattattttgagaagaataaaagaaaatgatgagttttatttttaatagatgattttttttttcgtttttaaggttgagtaatgggtatatttattttttagtttgataataggataaaaagttttttaatttattaaaagttttaatttttataggtagattttattgaagaaatgttattttggaaaattagaagttttaggatgttgattatttttttgtttttattttaaggtagttttagtatataaattataaatgattattttgttataagataatgtaatattaaagaataggtattaatttggaaaaggtaaatatttaagggttgagaagattaaggtaacgatttttaatttgttataatttatggttatggttgggttgggttttggtaagaaggggttgtttgtaagtggggtgtgtagtgtagagaaataaaagttgttaagggaatgatgagtgaattttttgatatgggagtttaaattttttagtataaaattgtattaatgtagtttttttgtatttttttttattttgtttttaaaatgtaaaattgtttttgttgaatgtaaaaagataatgtatttgtttttttggtatttgtaatatagtgagaagtgtattaattttgatattaatttagaatgttttatttagatttttaattttgatataaaggatcgtagattgttaagagttggaaatgagtatgagtaattatttaatgtagatttatattttttttgtgtaaataaggaaattgagttataggattttttgttagttgttaaagtatatattggttttttttacggtgatttaatataggtaaatcgtagattttagagtgtttttttttttgttttgtggggtttttttgtttttgttgtttagtattttttagatattttttttagtaagtaattagtgtttgaaataaaatttatttttagaagagttagatattgttcgtttatagtttaatgtgaattaagtttttgttattttttatttatttttttaataaggattatagagtatattttatatgttaattaatgttagatattgatgttataaaatggtggaagtagtgttttgtaggagaaataggtaagatttaggttagagaaggttttaaagagtaagtgagagttagatgtaggagagaaggaaataagtttttttttaaaagttatgttttttataggaaattgtaagttattttgtaaagtttaaatagataggaggtggtatggcgggaatggggttttatttgggattaggtggtttaattttagttaaaagttgtaaagtttttgaagatttttgagtagacgagttataggttttaatttgtaatttggatgggttttgataatagggtggagtatgagttgaataaaagaagttttggattaagaaggttagaaagtaggttaatttttgatataaggaaggtagtagaagggagagaaggtagtttgagaaacggaaaagaggtagagttatagaataggtgtttgaataggattagaggagatagaattaagagggatatttgtgtgtttggtttgagtattaggtggttttattaaaggagagatggaattaaggagaagtagtaaatttggtagggatagattagtaattaagttttagataagatgagtgaaggtgtttgaggaaattaagtaaagacgtttaaatatatttgatttaaagttttaattttatttataaaataaaattttgtttttaagtaattaagaagtttttttgtttggttaaatttaattttaatatgttgttatttatattaggttttattttttaataagtttttttttaaatgtatgaggtttgtttagtttttttaatttgggtttttatttttttaaaaataagcgttattggttatagttgttttgggtggtttttaggatattttgggaaaagaggttttggggtgtggacgggatttttaggtgttagttaatttgttagaatatgattaagtttatttttagtgttattatttatttattatattatgttgatgttgtgaagtgatttattgttttttgaatatttttcgagattgtaggtgttttagtataagggtagtattagttttttttttgttttttatagtgtttaggtaagtgtgtatatataagatatggtaaataatggttgtttataggacggattgtggacggatttgattattttaaaaatttaaaatttaaagatttaaagttagttaattttcgtttatttattttttttataaatagttagtgaatatatatattgtgtttaagtatcgtttaaggtgtaggggataaatggggaaaaagaaataagtttttatatttagaggattaggatatgaattagttgggaaaagataattattttttttatcgtatatataaaaattttaggagtgggtttttagtattataatatttgtgagtgttataataggatatttagcggttgtgggaattttttattttgggtaggtagggaaatgatatttaaattggtttatggtagaaaagaggaattaagtgaagattgggtttggggaaagaggagtaagtaggtaagtatgttttaggtagagggaatagtatatgtataagtttagaggtaaaaaagaggttagtcgtttttataggaaatgggagtaggatagtttagtttggttggaggataatgttatgtttttaaaaggatcgaaattattatttaaaattaagaataaaaaaaataaaataaaaataaatatataaaattaattttttgttaattaattttatttattttatttgaattaaaaaatatagaaagttatttggtgattattttttttatttttttaagtagggaatatattaatattattttagaaataagagagaagttaaattgttatttaagatggatgttttaggatatgagggtttaatttttttaggaattagtttaaaaggaatatagataagtgatggttgtttttattggtatgaatttttgtattgttattgtgtgattttgggtaagtgattgaatttttttgtgttttgtaaaggggataataaatagaattcgttttagtagattgatttaaggattaagtgtattgatttatttaaaaattttaagagagtgtttggtttatagtaaataaatatttagtaaggggtagttattgttaattgtaattttgttatttttttttagatttttaagtggtattgtttaaagttttttagttttgttttatattaaggatgatggatgatagattataaagggtattattaatttttattgagttaattatattattagttatttgataaatttttattgagtatttattacgttttggttattgtgtttaaaataggagaaaaatgatgaattgaggataagatattgtttttgtttatgtttgatagggaagataggtaaatggattataaaaatgtaatttggtaagtgttaatagaatagggtatagtggtaatataattcgggtttgggttttcgggagtaaggttttttttgaggagagatgttgtttgagttgtattttgaaagttaggggggtagttgagttgtggtgaaggggttgataatagggaggttacgttagtttgagggaatagtaggtttgttatttgggtttaagttgttgtaaagtgaaggaatgttttttgtatttttttagtatttgataaatagtataattattttatttgtagtattgaatgtttaatgtagtattgaatatgtagttttagtttagtgcgtgtgataattttgattttttacgttgattaggaattgggttgtttagttattgattcgaagtaatgatgtattttgtaataatatttgtggggttttaagaatttaggattagtgggatgagttttatgtttattttttggttaaaaaatgttttttttggataattgatggtacgtaacgtttttaggttttgtattcgtgttatttgagggtttttttgttagggtttattatttttttttaataggttgttaaaagaatagtttttggttttgattaaatgtttatttaattttatcgttttttacgtagttaaagtgtttaaattgttttggatttattacggttttttgttttattttagtttagtgacgaagagggaggttaagaggtagatgtttattttgtagaaggaaagagagaggtggagggcgtgagaaaggtgatttgcgggaagaagaaagagagaaaggagtataaatgtggattttaatgtttggaagtttttttttatagattttttttttaaggtgttttttaggtatagagattaataggaggagtttggaagtcggatgtttttcgtttttgtggttgtgtttatttattattttaataggttgtagtgttattttatagatatatatttgtgtttatattatggatagatgtgtatgaattttataaataggattaagtgttattagtttgttattttttttgtaggagttggatttatgagttttatttagagtgaagggtttgtaatttattaatttagaatgttttaagtaaatagtattaagtatttatgttttatagtaggaacgtagttggaatgtagtatttttttgttataggaagtaattagtattaataatttgtaggattgattgagttttattaattagggaagtattaggaataatatttattgaatagttattttgtaattggttaggttgagatttaattttaaaattgttatttgttttttgttttgatagttgtattttttttattgttttttttgggatatatagttattagtaattaaattttagtatttgttgatataatagtgcggggtgagtaagaaattagatttatgataggaaaaggttatagtttgaaaaggataatttttttgaagaaagtgaattgaatttggttattatatatgaaatgtttaggtattagaatttatggagaaatgttggttttaaagagaatattaaaatgtggaaaaagttaagagagaagtaatatttttttttataggggtttggtgggttaaattattagttatacgaagaatgtcgttttaacggttgttttttttgtagaaaatgaaagagaatcgataaatttagtatttatttattagttttttttaattagtttataagttgttttagtatttgttataaaaattgttaaaaggttagtttttatatagatagagtaataaaaggaacggtattattttaggtttaggatatgtgttacgtgtttgtcgttattttagaaatggaaaataaaggatgatgtgatttttttttttaatgtttatttataattgatttttgtagttatagttggtttaagagaataggtttataggagatttgagaatttaagatgttaatatattagatttaaatttaatttgaatataatttttgtttgttttgaaaaatagaggttaaatattttaatttataagaaaaatataatggaaagttataaaagtaattttattgtatagtaagtgaataataaattttattaaaatttattttgattaagcgaagaagataaaaaagtgtagtaatatatgtttgatattgataattttaatttagggtatggtattattatataataaaagttgtttttgtgttttatgattaaatcgtaaaattattatgtcgtttttttttaaaattaaaggatatattatattttagttattatttttaatatgaggggaaaagagatttattaaatagaaatagattataggataatatttgtgaaaagtgtgggaaaaaaaatagattatagtaaaaagaggggagtggggagagagagagattttttttttttgttgtattaattttgaattttatattttttatttaaatttgggtaagattttataaatttggaggttaggcgtagtggtttatgtttgtaattttagtattttgggaggtcgagataggtggattatttgaggttaggagttcgagattagtttggttaatatggtgaaatttcgtttttattaaaaatataaaaattagttgggcgtggtggcgtatatttgtagttttagttatttgggaagttgaggtaggagaatcgtttgaatttgggaggtagaggttgtagtaaattaagattacgttattgtattttagttagggtgatagagtaagattattttaaaaaaaaaaaaaaaaaaaaaaagatgttataaatttgaaagtttttttttgtaaaaaattttaattgtaattttttgttttgttagtttttgttataattaattatagtaagtaattttttttttttagttttttaattatttttgttattatgttaaatttatttaattattgtttttaattttttattaattttttttttttttttttaattaattattttattttattataatttagtttatgtttttttatgttagtaaatttatgtgtttttatttatttgtaattagatttttttaagatttatttttttgtttttttgttgtttatgttttttaatgttatatatatgaattagtatgggttttatatatattgaaaaatgaggtatttgtttttttttaagttttttgttttttttttagttttgtagattataaattttttgaaggtaagggtgtatatatatatatatatatatatatatatatatatatatatatatagattaagttttttagaattttggtaagtgttgtataatttgtggatattttataaatgtttgatgtttgtggttggttgacgatgttgatgataattatgataattagatgaggtttttgagtagaatagttttttaattaatgattgtaatgaagtaagaatttatgatattcgttattaaaaatgtaattgtataattaggttttaaggtatatattttatttttttggtgaaatatattgattttttttttttaaaaatattttggtaaggaaatttaaattttaaataattaaagaagaaaattttttatagaataaaggagattagtaagaaataaattatagtattttgggaagttataaaatggagtttttaaattttggtaagttttttaaaattaaatgaattatagttttttaggggaaaaaaaggttttatgtttgtagtttttggtatttttttcgttgaagtgtagagtagttatgggagcgggaggaatttagtagggaggtttgtattttagattttttgttttaattatatataagtttatgatttgggtgtgttatgtagtttaatcgggttttagtttttttatttgtaaattttttatgagttatgtaattattatattttattatgttgtaaataaagaagatttattttaaagttgattgatagatgataaagtaaaaagaaataatataattattatgttatgaaagtaatatagtttttataaaagtaaatacgataatatttttggaatttagtttataatatgagagtaattatagtttatatagttaaatagttataaaatatttaaattcgttgtgttgggtaagttatttaatttttttgggtttcggtttttataattattaagtggtttttaggattaatattattttttgagtttatgagtttgatatgattttgtataaattatgtagtattttttattgttacgataatttttttttgattttttaatattttattttgtattttaaaattatttttagggatgtaaatgattttatttttagtttatgtgtggttttatattttttttttttatttagggtttgttattacgttttttatttttaataattatgagttgattgtataatgatgaattttttgatgtagtaaaattgggaatgataatgttgttgaaaaatagaagtttttattatttagtatgttattgatatttagtgattggtaatgattataaatgtgtgatatattgagaataattttgtagagtattataaataggaaataatagtaaatttagtataaataaggtataaggttaaattttaaatgtttaaatattaagtataattagtagattacgaaatataatttttgattaagtattaattaattggttatttttgttttggataatgtaaaaattgtggttagtatgtaataatgtatttttttaaaaaagttttagtataatagagttagagtatgatttatttatgtgaattagtttttattgaatttagatgtttgtttggaaagaaattttgaatattttttgtttttagtttgattttttgattaagttttatggttattaatgataataaaattgattttaataatattagaaggtataggtatgagtggataggattggtaaaaatatttgtagatggggttgggcgtggtggttcgtatatgtaattttagtattttgggagatcgaagcgggtggattacgagattaagagatcgagattattttggttaatatggtgaaattttgtttttattaaaaatataaaaattagttgggcgtggtagtaagtatttgtagttttagttattcgggaggttgaggtaagagaatcgtttgaatttaggaggtagagattgttatgagttgagatggcgttattgtattttagtttggtgatagagttagattttattttaaaaaaaaaaaaaaaaaaagtttgtagatggatgagaattatcgtgggttgaagattaatatatttatgagattgatttaattttaaaattaatatgattaagtaagtagggagatgtattgttggtgaatttaaaattatagattagtcgagatatatttagtaattattttgggttttagttttaagttttatttgaatgttaaattattaaaattattgaaataagaagattaaaataggtaaggtggagggaaaagttataagtaatataatttattaagagaaagtttatatgaagtttttaaagttcggtttaaatttggtaaagaagtaaaaaagagaatagtggtaaaagagttggaagagaaaaggttgtttttaaaaatgatgtagtttggtattatttagtggtgttatatagatttttgtattaggataagtattttgtgttaatatgagtgattaaagattttattaaaaatttttttttgaagttagtattattttggtaataaattttgatacgttaaaaatgttttaaatatgtggatttagaatttaaattagataaagtatagataggaggatagaatatattattttgtaataagaattgagaagtttcgttattagttggttagaaagattagtagttttgagaaaatttaattttgggtttttaaaattttaaacgttttagtttatgaaattaaaaataaataagtagtaaaaatgtttttggataggaatgtaaaattagtatgaataattggagaagttattaaaaataaagaaaaaagaaaaattttaatatgatatattagggataaaagaatgtagaataattaattatggtagaaattcgaaaagaattttgttattatcgtggatattaagttaaatagagattgtattatttagtatgttataaaaaagaagatttggtcgggtgtaatggttcgtgtttgtaattttaatattttgggaggtcgaggagcgtggattacgaggttaagagatcgagattattttggttaatatggtgaaatttcgttttttttaaaaatataaaaattagtggcgtacgtttgtagttttagtttttcggaaggttgagaaaggagaatcgtttaaatttgggaggtagaggcggaggttgtagtgagtcgagattttattattgtattttagtttggtaatagagtaagaaaagagaaagaaagaaaaagaaagaaagaaagaaagaaagagagagagagagagagagaaagaagagagagatagaaagaggagagaaagagaaagaaagaaagaaagaaagaaagaaagaaagaaagaaagaaagaaagaaagaaagaaagaaagaaagaggattttttaataagaatatggtataaggtgagtttattttatttggattaattatagtttagagggtttataattataaaggtatggataatttgaataaggtttaaagaaaatgaaggtaatgattaaaggagaaaatttatagtgtttttggtatgagatattttttgtttttatatttttagtttatgataatatagataggtaatatttattaaatgtttattacgggttaggttttgaattaagtgtttgtaaaggtttattttatttatgttttaaaataattttggttaggtacgttggtttatatttgtaattttagtatttagggaggttaaggtaggagaattatttgaggttaggagttttaggttagtttagttaatatggtaaaattttatttttattaaaaatataaaaattagttaggcgtggtggtgtatttttataattttagttatttaggaggttgaggtacgagaatcgtttgaattcgggaggtaaaggttgtagtgagtcgagatcgtgttattgtattttagtttgggtaatagagggagatttcgtttaaaaataaataaataaaataaaaaaaattttataaaaaagatattattatttttattttatagatgtagtaattgaggtttaaagagttaagtttaaggttatttgggaagtaggtagtagaggtagggttttttttaggttaatttattttttttattagggttgtagtttttattttttaagtaatattttttttgttttttagtagatttttttatgtttatatatttaagttttgagatgattttttattaaagtaggaaatatgaaagggagaggagtatagtgagatttttttgtttagattatttaaaataagacgttaaagttgagggtttttgaatgtgagtttttttttttattttttagaagaattgaggtttgggggaaataagtgatgcgtttaaggttatacggtggagttttgtttagaagtttggtgtttagatatcggtttagggattttgatgattttatataagtaaaacgatgtaggaattagataagagaaagtgtattgattttttgagtttaattttggttagtttgatttaattttttttttgtttgattgatttcggagattgaggattggttttggatttgagaattttttgaattttgagtttagtaggttttttgtttatttttggttatagaatattttaatttttagatttattagatgtttatatttgtttagttttgttttaatttttagtaagttttattgttgtttaggttttaatgtgatattttgtttaaagcgtttgttttttaattgttttttatttttaatttttttttttttattttaaattttaaacgttttaaattattttgtatgttaattattttaaattatatttttagtaaaaattttaaagttttttatcgtatttgatgaatataagtttttttaatttgggttttatgagtttttaatatttagtttgaagttattaatttatatatatttttagttgggtatgttggtttatgtttgtaattttagtattttgagaggttgaggcggaaggatcgtttgagtttagaagttttagattagtttaggtaatatagcgggattttatttttttaaaaaaattagttaggtattggtggtatgtgtttgtagttttagttatttgggaggtttaggtaggagaattatttgagtttagtaggttaagtttgtagtgagttgtgatagtattattgtattttagtttgagtgagattttatttcgaaaaaaaaaaaaaaaaaaaaaaggtcgggtacggtggtttacgtttgtaattttagtattttgggaggtcgaggtaggttgattataaggttaggagatcgagatcgttttggttaatatggtgaaatttcgtttttattaaaaatataaaaattagttatgtgtggtggtgtatatttataattttagttatttaggaggttgaggtaagagaattgtttgaattcgggaggtggaggttgtagtgagtagagattacgttattgtattttagtttgggcgatagagcgagtttttgttttaaaaaaaaaaaaaaaaaaaaaaaaaaatatagggttttttaaaattgaattgttagtgagagggaagcggattgtaaaagttaaagaaataatgtcgtttgaatagttaattaattttttaaaatttatatatgaaagagttttagaataaagatgttattaattgttatttaggtgggtatattaaatattataagatattaggttgaatataggtaggagtattttgattatgttaaatatgtaattagataatgtttaattgttataatataagttttattttaagttaaaggtaaggaatttttattatattatgagtaagtgaaaatgatttatttatagaaaatgtttatttgatttaaaatgataaattagatattgaggtaatgtagtacggatcgttagttatgttatttattcggtaaaaatgtaagttattggtaagtttataaaatgtttttgagatagtattatatattaaatgtaataaaataatgttataggtaaatagttgttaagttgaggaagttttttaaatgattttttttttttatttttttttttttgtttattaaatatttaagttttttttaggtttttaatttttttttttttattttttttttacgttttttatttgggtagtatagggtagtggaaagagggttggtttgaaagatagatgatttggttttaaattttagttttattatttagaagttatgtggtgattttggatataaagaagaggaaatttttgagtagagtttagaaggagaatgagtttagttttgttaagtaataaatgagaatggtattttaggtaaagagaatagtttatgtaaagatgtggtagtgtgaaggagggattaggataataggtttagagtaagagggtgcgtgaggaagtggaggagaggttgagaaagggagtaagttaacgataggtattgaatttattttttttttatttttttaatttattttatttatttattttttgagataaggttttattttgttatttaggttggagtgtagtggtgtaattaggaagtttatggtaatttcgattttttaggtttatgtgatttttttattttagtttttcgagatgttaggattataggtgtatattattataatcggttaatttttgtattttttgtagagatagggtttcgttatgttgtttaggttgttatttttttaggtaataattattatatatagtatttattttgtgttaggtattattttacgtattttattagtaattatttaaatttaatttttgtaatattatgtaggaagaattaattatatttattattttatagttagggaatagaggtatgtgagggggttaaggagttttaaggttgtaaagttggttagaggtagagttaggaattaaattttgaagtttatgtttgtaatttttaggttatgttgttttagcggttttaataaggaaattgaagtttgagttaagatttgtttaatttatatgttagttttaatgtgaggtttaaataagtaattgtaggttttattggtcgatattaagttaaagggtgtgtttatttattttttttatttttttattatttatttgtttttgttttattttgttttttttagaatagatagtggttgtattaagtttttaagtatgttatgtattttgtttgagtttttgtttttttatttaaagatgaagttagttatagaatttaggtttaaagtagtttttgattattgttaggaggtgttttttgtttggttaacgtgggtatttagtaaattagagttgcgtgtggtggtttatatttataattttagtattttgggaggttgaggtaggaggattttttgagtataggagtttgagattagtttgagtaattaacgtagggagatttttatttttatttttttttttggagtcggagtttttttttgttatttaggttggagtgtagtggtttaattttaggtaatttttattttaggtaattattttgttttagttttttaagtagttggaattataggtatatgttattgttttcggttaatttttttatttttagtagagacgagttttttttatgttggttaggttggttttgaatttttgattttagggatttatttgttttagttttttaaagtgttgggattataggaatgagttattatgttcggttaattttgtttttattatttaaaaaataaataaataaaagagatagagttttattttgttatttaggttttatgtagtggtacgaatatagtttattgtagtttcgaatttttgggtttaagtgatttttttgttttagtttattaagtagttaggattataggtgcgtataattacgtttaattattgttttttttttgagatagagtttcgtttttgtcgtttaggttggagtgtagtgacgcgattttagtttattgtaatttttattttttaggtttaagtaatttttttgttttaattttcggagtagttgggattataggcgtttattattacgtttggttaatttttgtgtttttagtagagataggattttattatgtgtttaaattggtttcgaatttttggttttaagtgatttggttatttcggttttttattgggattataggtgttagttattgtgtttagtttattttataatattttttgaatgaataaatgagtttttgttatattaaatgaggtagtgtgtatttaaagtatttagtatggtatttagtataaagtaattgttagtttttagttttttgttttatataaaggtagaatggggtttagtggagggtagtattagttagtatttgttttttcgtatttttttattagtacgtacgtatttattatttatttttgtttgttttagatttgagtagtggtatttatgttatttataggtattatttaaaatttatgggagaggtcgggtacggtggtttatgtttgtaattttagtattttgggaggtcgagttaggtagattatgaggttaggagtttaagattagtttgattaatatggtaagattttatttttattaaaaatataaaaattagtttggtatgatggtaggtatttgtaattttagttatttaggaggttgaggtaggagaattgtttgaatttaggagatagaggttgaagtgagttgagattacgttattgtattttagtttgggtaatagagcgagattttattttaaaataaataaataaataaataaataaaaaaaatttatgggagagtatagcggtaaaaaggtagataataggttaggcgtagtggttcgtgtttgtaattttagtattttgggaggttaaggtaggtggattatttgaggttaggagttcgagattagtatgattaatatggagaaattttgtttttattaaaaatttaaaaattagtagggcgtgttggtatatgtttgtatttttagttattcgggaggttgaggttggagaattatttgaatttaggaggtagaggttttggtgagttgagattatgtattttagtttgggtaataagagtgaaattttattttaaaaaaaaaaaggtagataatagttttatttttgaaataggaatagaagttttttgttgtattaatatagagtatagaattattattttgtataattatattgttttttagagtttatatttttgaaggggatggtttgtttggttttagggagtttaggatttaagattttattgaaaatgttagaattgttttatttgtttttttttttagaaagttttttttgttatggataatttacgtttatttgtatgttggaatgatttgtaatgttggtatttaatataattataattttatttaggtatgtgaaaatatttagaatgttaaataataggagaaggaggttttgtttttaatataagatagtattaggattttttataattttttatttggttttttttattgatagattgaattattagagtaaaattttagtttagataagaaataatatagtcgtttagttttttggtaaattatatttagtatttatttttttaaaatgataaataataaattttttaagtggaaaaattttttaaagtatttagttaattgagtaatgtagtaagtagtgtaggagatttttttttttatttttgtagtaaaaagaaaaaaagtttgaatttattagtataaggtaatatgatttatatgttaaatgttatcggttttgaaattgagttttttttgaaaagttatttatatttgattttaataaagttaagaattttataagtatttttttttttttttttttttaaaatgtatttgttatttttttgtattagtattttgtttattaatggataatataaaaagtaggtaggagaataaaattaattatttatttgagttttattattataaattaaattatgattatttttaatagaatatgtgaatatggtttataaataggtttttttattggaaatttgaggtttagtgaggtgtaatggtttgataaattataatagggtagtgtttatggtaattagagttttttattttaggttaattatagttttttttatatttttttttttgttagggattatgtattttatgaatttttataagaattttgtagggttagtattattagttttattttattaatgagaaaataaggtttagagagttatgtaatttgtttaaagtagaagtattttagttagaatttaagtttaggtttgtttttttttaaagtcgatgtattttttattattgttttgttatttaaagtgtggtttttgggtcggtggtataggtattattatttgagagtttgttattaatataaaatttttatttttattttagaattattgaattagaatttatatttttttaagattttttaggttatttatgtaaaattaaagtttggtaagttttgtattatattattttgtttttttgaatgttattattattatttttttttatagattagtggtttttaatgtggttatggaggttgggtagggagaaagaggagattggagggtgttttttttattttagggatatttgataatgtttgaagatatttttggttgttataataattgggatggggtgggggaatgttattggtatttagtaggtagaggttagagattttgttaaatattttagaatatataagatagttttttataataaagaattatttagttaaaatgttaatagtgttagggttgaaaaattttgttttagttgataatattgtttaatatttttgggtttggaatttatttaatgaagaaaaaagagttttttttggtaaaattgcggttgaaaaatgttatataaaattttttttttggatggatatagtggtttatatttgtaattttagtattttgggagattaaggagggcggattatttgaagttaggagtttaagattagtttggttaatatggtgaaagtttatttttattaaaaatataaaaattagtcgggtatggtggtatatgtttgtaattttagttatttgggaggttgaggtagaagaatcgtttgagtttgggtgatagaggttgtagtgagttgagattatattattgttttttaatttgggcgatagagcgagatttcgttttaaaaaaaaaaatttttaaaaaattaaaatttttttttttataggttagttttttttatttttttataatatttaatatttattaaatagtaatttagattagagattagtaaattatggtttataggataaatttaatttattatttatttttgtgtggtttgagaattaagaatgatttttatttttttttttttttttttttgagacggagttttatttttgttgtttaggttggagtgtaacggcgtgattttagtttattataattttcgttttttaggtttaagtgatttttttgttttagtttttcgagtagttgggattataggcgtgtgttattacgtttagttaatttttttatttttagtagaggtagggttttatatattggttaggttggtatgaaatttttgatttcgttattcgtttatttcggtttttcgaagtgttgggattatatgcgtgagttatagtgtttagtatgttatattttttaatgtttatttttttgtgaaaattatgtgaaatttaaatttttgtgtttataaagtttttttggaatatagttatgtttattgtttatattttgtttaaggttttttttaaatattttgatatataatttatatattttaaaatttatttatttaaagtgtataatttagtagtttttagtatatttagtgtgtataattattattagttagttttagagtatttttattattttataaataaaattttgtatattttagttattatattttttattttatttattttttttagttttgaataattattgatttattttgtttttgtagatatgtttattttagatttgtatatgaatggaattatatgtgtttttttgcggttggttttttttatatagtatagtgtttttaaggtttatttatgttgaagtacgtgttggtattttattttattttattgttaagtaattttatagtaaggatagattatattttgtttatttatttattagttgatgtatatttgaattgtttttattttttggttattatgaataatattattataaatatttatatataagtttttttcgtaaagttatgtttttattttttttgagaagatatttgtaagttgaattgtggggttatatggtaattttgtgtttaattgtttgaggaattgttattatgtttttttttttattttttttgagattgggttttattttgtcgtttagtttggagtatagtattataattatagttaattgtaattttaaaattttgggtttaaggaattttattattttggttttttaagtagttgtgattatagaggaacgttattatatttagttaattgtttttttttttttgagatagggtttcgttttgattattaggttggaggtgtagtggtgtagttatgttttattatagttttttttaggtttaagtgatttttttattttaattttttaagtaattaagattataggtgtaagttattacgtttggttaatttttaaattttttgtagagaaaaggttttattttgttgtttaggttggttttaaaattttggttttaagtgatttttttattttggttttttaaagtgtaggaattatatgtatgatttattatgtttggttaattagtttgttttttaaattggttgtattattttacggttttattagtagtgtaaaagggtttatatttttttatatttgttttttgtttttgtttttgttttttttagatagagttttgttttgttgtttaggttggagtgtagtagtataatttgagtttattgtaatttttatttttcgagtttaagtgatttttatgttttagtttttagagtagatggtattataagagtatgttattacggttggttaatttttgtatttttagtagagatggggttttgttatgttggttaaggtagttttgaatttttgtttttaagtagtttatttgttttagttttttaaagtgttaggattataggtatgagttattatatttagtttaatttttgtatttttaatatagatagggttttattatgttggttagattggttttaaatttttggttttaagtgatttatttattttaatattttaaagtgtttagattattggggtgagttattttaattggttttttgatttattttaagtttttttttgggtgggggatggagatttattttgttatttaggttagagtgtaatggcgtgattttagtttatttttgggtttaagcgatttttttgttttagttttttaagtagttgtgattataggtgttcgttattatgtttagttaatttttttttttttttttagatggagtttttttttgtcgtttaggtcggagtgtagtagtgcgatttcggtttattgtaagttttattttttggatttacgttatttttttgttttagttttttaagtagttgggattataggcgttcgttattacgtttagttaattttgtttttgtatttttagtatagatagggttttattatgttagttaggatggttttgattttttgatttcgtgagttatttatttcggtttttcgaagtgttgggattataggtgttgagttatcgtattcggtttattttttgtatttttagtagagatggggttttattatgttggttagtttcgttttgaatttttgattttatgatttatttgttttggttttttaaagtgttgggattataggtgtgagttatcgtgtttagttatgagttaatttttgtatgtagtgtgaggtaagggtttaatttttttttttttttgtatgtggttatttagttgttttagttttatttgttgaaaggattatttcggtcgggtgcggtggtttatatttgtaattttagtattttgggaggttgaggtaggtggattacgaggttaggagttcgagattagtttggttaatatagtggaattttatttttattaaaaatataaaaattagtcgggcgttgtgataggcgtttgtagtttaggtatttaggaggttgaggtaggaaaattatttgaatttaggaggcggaggttgtagtgagttaagattgtattattgtattttagtttagatgatagagcgagattttattttaaaaaaaaaaagaaaaaagaaaagaaaggattatttttttttatagtttgtggtatgtagtaagaaaagataagataagatagtttttttttattgaatggtttttgtatttttgttaagaattaggtgattatgaatttttaattttattttattgggtttatttttggatttttaattttatgttattgatttatatatttatttttatattagtattatattgtttttttatttttatttttttgaaatggaatttcgttttgttttttaggttggagtgtaatagtacgatttcgatttattgtaatttttattttttgggtttaagggatttttgtgttttagtttttttaagtagtttggattataagtgtgtatttttacgttcggttaatttttgtatttttggtagagataagatttcgttatgttgtttaggttggtttcgaatttttgtttttaagtgatttgtttgttttggttttttaaagtgttgggattataggtataagttacggtgtttggtgacgttgttttgattagttgttttatagtatgttttgaaattataaagcgtgagtttttttgttttgtttttttttaagatttagttattgtgggttttttgcgattttataggaatttatgaattgatttgttaattttttttttttttttgagatggagtttcgtttttgttgtttaagttggagtgtagtggcgcgtgattttagtttatcgtaagtttcgttttttaggtttaagcgattttttgttttagtttttcgagtatttgggattataggtatgtgttattatattcggttaattttgtagttttagtagagatagggtttttttatgttggttaggttggttttgaatttttgattttaggtgattcgtttgtttcggttttttaaagtgttgggattataggtatgagttattacgtttggagatttgttaatttttataatgaaataaattgggattttgatagggattatgttaaacgtgtagattaatttttaaaatattgttaatttgataacgttatgttttatgatttatgaataagagttattttttatttatttatttatttatatttttttttttttaaaaatgttttataggttaggtacggtggtttatatttgtaattttagtattttgaggggttaatatgggaggttgtttgaggttaggtttaagattagtttgggtaatatagggagattttgtttttataagaaattaaaaaataaataaataaaaaaaaaaagttagggatgatcgcgtatgtttgtggtttgagttgtttgggaggttgatataggaggattatttaagtttggaaggtttaggttgtattgagatatgattgtattattgtatttgtttttattttagtgtaagttcgagaaaaaaaaaaattaattaattaaatattttaaaaggttaggttgggcgtattagtttacgtttgtaattttaggatttttagaggttgaggcgggtggattatttgaggttaggagttcgagattagtttggttaatatggtgaaattttttttatattaaaaatataaaaattagttaggtatggtggtgtatatttgtagttttagttatttcggaggttgaggtaggagaatcgttttaatttgggaggtagaggttgtagtgagtcgagatcgcgttatcgtattttagtttggacgatagagtgagatttcgttttaaaaaaaattaatttaaaaaataaaattaaaaatgttttatagtttttagagtataagttttatatttttttttattaaattgttagaggatggaaaaaaagatattttttttgttataagtatttttattttttaggttattgtaaatggaatttttttaattttttttttagattgtttattttaagtggatatatttataattaagttttgtgtaatgattttgtattttataattttattaaattaataatttattagttttaatattttggtagtggattttttagggtttatatgtaagattatgttatttgtagagatgattttatttgtttttttttaatatagatgtattttattgtatttttttgtttaattgttttggttagaatttttagtataatgttgaatagtagtagtgaaagtagatttattttttttttttttaattttaaggataagtatatagttttttattattttgtttgtttgtttgtttgttttgagttttgtcgtttagtttattgtgtgtagtagtgttattttagtttattgtaatttttgttttttaggtttaagtaatttttttattttagttttttaagtagttataattataggtatgtattattatatttggttaatttttttttgtatttgtagtagagatagggttttattatgttggttaggttgtttttgaatttttgattttaagtgatttttttaattttggttttttaaagtgttaggattataggcgtgagttattgtgtttggttttagttttattattatgaagttagttgtgggttttttataattgttgtgtattaggttgaggaattgtttttttttttttagtttatttagtgtttttattatgaaaaatatgttgaattttgttaaatgttttttttgtgtttattgagatgataaggtgatttttgttttttattttattgatataatgtattatattatttatattaatttatttttggatgttaaattaattttgtatttttggaataaattttgtttgtttatggtatataattatttttatatgttattggatttagtttgttagtatttttgttgaggatttttgtttttatatttgtaagatatatttgtttatggttttttttttttgtaatgtttttttttggtttttggtaatagggtaatattagttttataaaattcgtttgtaagtattttttttttttttttatttttgaagattttgtgaagaattgtattaattttttttgaaatgtttgatagaatttagtggtgaagttattaggatttttagtaggtataggtttgggttttgttttgttttttttttttttttttttttttttttgagatggagttttattttgttatttaggttggagtgtagtggcgtaattttagtttattgtaatttttaatttttcgggtttaagcgatttttttgttttagtttttcgagtagttgggattataggcgtattttattatgttcggttaatttttgtatttttagtagagatggggttttattatattagataggttggttttgaatttttgatttcgtgatttgtttattttggttttttaaagtgttgggattataggtatgagttattgtatttagtttttttttttttttttaagagatagggttttattttgttattttggttgaagtattgtggtataattatagtttattgtttttttaattttttgggattaagtgatttttatattttaattttttgagtagttgggattttaggtttatattattacgtttagttgagtttagatatagtatgtatattttagagttggggtttttttatgttgtttaggttggttttaagtttttggttttaaaggatttttttgttttgattttttaaagtgttgagattataggtaatagttattgtgtttaggtttttttttttttttttttttttaattatttatttattttttaagggtatattattttatttaaatttatatttttaaattttattagatttatattattaagtatataaataaattatatataatacgaaatagaaaaaaatattaagattttttttgtttttggaaaataattgagaaataataaaattttttttagaaatatagaaaaaaattgtttttatagtgtagttaatatgttttttttagatattaagatatttttttgtttgtatttttaatgtagttatatttttattttttataaaaattaaggtttttaataaaaatagtattttatttattaattattaaattgtattattgaaaatgtagttatatatattaatttttaattttttagaatattttgtataattaattataattattgaaacgaataattgtttaaaaacgtagaatggttttaattatattatgatttggtagttaatatttttgttttttagtaaaaaggagattttataaataaatattgggttttttaaggttttattaattaagagaatttttttgagtagtttttgagtaaatgttttttaataggttgattatagatttagggtttttattttttattatagtattgttagatataattatgttagtttcgtttttgtatatttatggatagtgttaggatttattttattagcgatttttatagttaaagatgggaattggatttttaattagtgaatttttaatattatattttttatgaatttatgttttttaaattttggttttattgttataattaaggttatatttagttgattagtttatggtgttaaatattgaattgaggtttttggttttatggtaaggttaatttttattttatttttttgaatgtttttaattaaagtttttgggtttttagttttttcgagatgaaagatgtattgattggttttttttatagttattggttttatttattgttttggtttggatattattatatgtatgtttatttattatatttcggtggagataatcgattttagagtttagtatttagaggtattgggtttttaaattggttaggtagtattgaggatggataggttaattttgtagttcgatgttatattattggtttttaagggtaagttattttacgagtttttttaattattaatttaatatttttatttgttataggtttatttagatagtgtttttttttgggttaattttggtggtttatatttttttaggagtttgtttattttattgaagttatttaattatttggtatttaattgttattttatttttttttgtatgtgttttatatttttttttttttttttagggtagggatggagtttcgttttgttatttaggttggagggtagtggtacgatttttgtttattataattttcgtttttcgggtttaagtaattttttcgttttaattttttaagtagttggggttataggtattcgttattatgtttaattaaatttttgtatttttgtagagatggggttttattatgttggttaggttggttttgaatttttgattttaggtgatttatttattttagttttttagagtatttttaaagttattgtgcggtggttgaggtaggagaatcgtttgaattagggaggtagaggttgtagtgagtcgagattgttttattgtattttagtttaggtaatagagcgagattttgttttaaaaagaaaaaaaaaattaacgaattttttttttatttagtttaaatttgttattgagttttgagtttttttagttaatttttaaatttgttattgtattttttttttttttttttttttttttgagatagagttttgttttgttgtttaggttggtgtgtagtggttcgattttggtttattgtaattttcgttttttaggtttaaggaatttttttgttttagtttttcgcgtagttgggattataggtgtcggttattacgtttggttaatttttgtatttttagtagagacggggttttattatgttggttaggttggtttcgaattttcgattttaggtgattcgttcgttttagttttttaaagtgttgggattataggtgtgagttatcgcgtttagttgttattgtatttttaattttagaatttttatttgattttttttttataatttttatatttttatggatattttttaattgatgtaatagtgttatattattttttatttttttgttattatatttttttttagtattgtgaatatatatagtattgtgaatatatatataggttagtttgaagttttttttattaatttggttttttgttttataggtagttgttgttgttagtttttttttagtgtatgtgttatatttttttgtttttttgtacgttttataattttttgttggaaattggatattttagataatatattgtagtaattttggggattggtattttttttttagggttaattgttatttatttgtttagcgattggttggattatttgagtgaaatttattttttttgaaaagtgttaaggtttatgatattgttttttagggaggtgtagttttgggtatgtttatagttattttgggatgatagtggttttggtagggtttttttttattttttttttgattatatttagttatgaagttttattaattgtggtatattgttttattatttttaataatatattgaggtataatttgtttttattttataaattgatataattaaattgtggttgtttggaggaaagtatttttttttatttttgttatatattttattttttaaattgttttttattgatttataatagttgtatatatgttgggggtatttgtagtatttcgatatattaatatataatgtataatgatataattaggataggagggatatttattattttagaggtttgtggttaatgttttgttttgtgataggatagagttttattgttatttaggttggagtgtagtggcgtgattttggtttattgtaatttttattttttagtttacgtgatttttttgttttagttttttaagtagttgggattataagtgtatgtttttatgtttagttaatttttgtatttttagtagagatggggtttattatattggttaagttggttttaaattttcgattttagatgatttgtttgttttagttttttaaagtgttgggattataggcgtgagttattatgttgcggttaatgtttgattttttttttgattttagaatggttttttttagttgttttattttttaattttttttagtaaattaggaggtttatagtttaggttgtatttttattaaattcgtagattttttagttgttttttattaaaatttttatatttttagattgtttttaggtatgaatttttttatattgtgttgtaaatgaagttattgttattggaaagagattaggagttatttgttttagggtttgttttttttttgaggtaaaatttcggagttaaggttttggagttgtggggaaggattttggaaagattttttttgagaaatatttttattttaggaattgagtatttggtggaaggaggtaggggatcgtaataatttgaggtttagtttgtaagaattgggggatgagtaattggggtattagtaattttagtatgttatgtttaaggtatagttttgttttataagtagggattaggtggaagaagggagttttaatttttcgtagggtatagtggtttacgtttataattttaatattttgggaggtcgaggtaggtggattatttgaggtagggagtttaagattagtttgattaatatggagaaattttgtttttattaaaaatataaaattagttagatatggtggcgtaagtttgtaattttagttatttgggaggttgatgtgggagaatcgtttgaattcgggaagtagaggttgcggtgaggcgagattatattattgtattttagtttgagtaataagagtaaaatttcgttttaaaagaaaaaaaaagagagttttaatttttaattgtatttatataggttttaattttagtaataagtagttttaggtaggatgagaaatgttgatgttttgttttttttgggaagaaagtatttgattgggagttgggggagtagtgttcggtattatagtttgtaatagtttggagtagaagttttattttattaagttaggagtgagtaaggagggaatgattttggtttaaatattatatttttttattttttttatcgaatttgtagatttttttgaataggtgtttttttatttgttgtttgtttttaggattattgtcggagggtttaaatagttgattttaaaaaaagaatttttgggttaggcgtggtggttgtatttgtaattttattattttgggaggttaaggcgagtggattgtttgagtttaggagtttaagattagtttgggtaatatggtaaaattttgtttttataaaaattagttaggtgaggttgggcggggtggtttatatttgtaatcgtattatttttttattattttgggaggtttaggtcggttggttacgaggttaggagttcgagattagtttgtttaatatggtgaaattttgtttttattaaaaatagaaaaattagttagacgaggtggcgtacgtttgtaattttagttatttggaaggttgaagtaggagaattatttgaatttggaagtggaggtggtagtgagataagatcgcgttattgtattttagttcggtgtattttgggtgatagagcgagatttcgttttaaaaaaaaaaaaaaaaaaaaaattagttaggtgtggtggtatacgtttgtggttttagttattcgagaggttgaggtaggaggattgattgagttagggaggttggttagggttgtagtaagttatgattatattattgtatgttagtttcggtgatagagtgagattttgttttaaaacgaaataaaataaaaaagaatttttattagttttatagaggaatgggttttttaagttgttatgttggaagttgattttatttaaggttgtttttgtgttataatggtagagttgaagagttgaataattttaatagagattttttagtttataaagttgaaaatatttattatgtggttttgtatagaaaaagtatgttaatttttgtttattgttgttaatgttgttggtttataaattatatttttagtagtaagaatttaaattatttgagaagtagtattgtacgggttgtgagtttggtttaaaattttattttgttatttattagataaatgggtttgttttgaggattaaatgtgtaaatgtttagtattttgaaaatattgaataattgatagttgttattattatgttggaaattatgtggaaagtaagtatgagatgttatatcgttttttaaagggtttttttttttagaatatgtaagttttagaaaagggaaataagtattggttttttaataaataagacgtaatttttaatatttgggtatataataatattatttaatgaaagaataaatttttaagtttttaagcgtaagtttaatttaagtttgatattgaaattttgaattttttattataggagtatttagttttttttaataataatgaatgaaaataatttttaggaaatgttaaaatttaaaagttttatgaaaaaaagtagtaattatttttaatatgaggttttgggtttagttggttttttcggttttgttcgtttttagttatatttataagatgatataaagagaatttttcgagtttttatttcgattgttatcgtagtagtcggggttgtcggtcggttatttcgtaattgaattttatttcggcgtttatggtgacgatttttacggtgaacgttttgggttgtttttttttgagagagttgaagtttatgcgggaagcgatggtttcggttatggcgcggggtttaggttcgggattttcgcgttttacggtttgtattttgagttttttagtttttttggagttgttgtataggttttagggttattatggtggtcggttgttcggttcgggaacggtttgggttgcgcgggtttttagcggttagtatgggtcgcgaggattttgtttgagcggaaaggggagttgggggacgggttttgacggttgtagggagggtataggagtcgggattttcggtgtaggcgcgattcggtatttcgggattcgggtcggagatgtcggggacgtttcgggacgggatttttagacggtagcggtttagatttcgcgcgttttttagcggtcgattagggttacggggtcgcgttgtatcgggcgcgtacgcgcgcgcgtggttgttatcgtttttatttcgcgcgttcgcgggaagcgtattttttttatagttcggggtttgttttcggtttcgtttttaggtcgtttagattattacgcgtagcgtaatcgaatcggaggttgacgtatagatgttgcgattggttgggaaggttaaggtaggtaggattttttcgtttcgtttcgttttttttggggtgattttattaatggaaagttttattttaattgtaaaaaaagtaggtttaggttcggcgttgagtggttatagtggtagttattttgaatgtttttgtgtttattttaataagattggttgaggcggcggatttttgttgattttattcgggaaattatttagaggttggattcggggcgaggggaattgggtttttcgttggtttagggagggatttttcggtttaagtaggtttcgagtgtggcgttttaggggattgcgtttcggatatacggcgaatatttttttttggtagttaattatatatatcgatttttatgaaattttaaagatatttgtggaggtttgttaggtttgttggtattttttcgttagatttttttgtttttttttagaattattattattattgttattattattattattaattattattattattgggacggagtttcgtttttgttgtttaggttggagtgtagtggcgcgatttcggtttattgtaattttcgtttttcgggtttaagcgatttttcggcgttagtttttcgagtagttgggattataggtatgcgttattacgttcggttaattttgtatttttattagagacggggtttttttatgttcgttaggttggtttcgaattttaggtgattcgttcgtttcggtttttcgaagtgttaggattataggcgtgagttattacgtttcgtttagaattattattggttatatttatttcgtgaggttgttgaattttagcgtattgaatatatataaggttttagagttgagtttggtattttatgaaattgttgaatttgggttgaaaatgaaagtattttttattttatattttatgatgtttatttttgaatcgtatttatgtattatttatttagtgttattaagggttttaacgggtgtaggggggataattatatttttttgtatttagataataaattttattttaaaatagtttttagtagttaaatagggataatttattgtgttttttcgtttgttttttgttttgagatagagtttcgtttttgttgtttaggttggagtataatggggcggtttcggttttttgtaattttcgtttttcgggtttaagtaatttttttgttttagtttttttagtagttgggattataggtattcgttattacgttcggttaatttttgtatttttagtagggacggggttttattatgttagttaggttggttttaaatttttgattttaggtgatttgtttattttggttttttaaagtgttgggattataggcgtgagttatcgcgttcggtgtattgagttttaataataataattattttataaatgttagttaatattagtattatttttttaattttataggtgaagatattgagagatatgatagagttattcgttgattataatgtagatagtgaaaggtaaagttaggatttaaatttaggtttgttttatttagagtttgttggttagtattgtgttgttttgtttttaaattttttttattatagttttaggaaatgtgaattatagtttcggagtatttagtagatattgttgttgtaacggtatattaatggaataaatttagtttttttgtacggatttttgttgtgtttggtagtatcggttaggttttaggaatgatttgttgttatatttagtgaggttgttgtggggattttatgttttgttttttgttagtaaattttttttattaaaattgattgtttagggtagtatgggtttggtatgggagtgtttttattattattgttttatttttttttcgtaggtgggagaatcgggttgggttttttgggttttttatagggataataaatggttgttgataaaaatacgtgatatcgggtcgggtttagtggtttacgtttgtaattttagtattttgggaggtaggtagattataaggttaggagatcgagattattttggttaatacggtgaaattttgtttttattaaaaatataaaaaattagtcgggcgtggtggcgggcgtttgtagttttagttattcgggaggcggaggtaggagaatgacgtgaattcgggaggcggagtttgtagtgagtcgagatggcgttattgtattttagtttgggcgagagtgcgagatttcgttttaaaaaaaaaggaaaaagaaaatgcgtgatattgggaatttagtgaggagtagtaaaaggaggtggattagttagtagggattaaaaagcgatattgatgattggtaatagtttatttttatgaaaagatttgttaggtgttaggtattgggttaattggttttaaatgttaaatttaatgtttttgggaggatatttagttggatatatgggtttgaattttagaagggaggttagggttaggaataaaaatcgatgtgatagaattttttgttggtattaaaagtgttatttataggttggatatagtggtttatatttgtaattatagtattttggaagattaaggttggaggattatatgaggttaggagttcgagattattttgggtagtatagtaagattttatttttataaaaaaaagtaaaaatttagttagtgtgtgttaggtgtggtggtttatatttgtaattttagtattttgggaggcggaggtaggtggattatttgagattaggagtttaaggttagtttggttaatatggtgaaatttcgtttttataaaaatataaaaaaaattagtcgggcgtggtggcgtacgtttgtaattttagttattttagaggttgagagaggaaaatcgtttgaatttaggaggtagaggttgtagtgagttgagattatgttattgtattttagtttaggtgatagaataagattttattttaaaaaaaaagaaaaaaaaattagtttgtgtggtggagtgtgtttgtagttttagttatttagtggggttgaggcgggatggttatattagattaggagttggagtttatatgagttatgatggtgttattgtatattagtttgggtgatagagtgagatttttagttttttaaaaaatgttatttataaagaataaatacgggtcgggcgcggtggtttacgtttgtaattttagtattttgggaggtagaggcgggcggattatgaggttaggagatcgagattattttggttaatatagtgaaatttcgtttttattaaaaatataaaaaattagtcgggcgtggtggcgggcgtttgtagttttagttattcgggaggttgaggtaggagaatggcgtgaattcgggaggtggagtttgtagtgagtcgagatcgcgttattgtattttagtttgggtaatagagcgagatttcgttttaaaaaaaaaaaaaaaaaaaaaagaataaatacggttaggtatagtggtttatatttttaattttagtaatttgggaggtcgaggtgggtggattatttgaggttaggagtttaagattagtttggataatatggtgaaattttcgtttttattaaaaatataaaaatttagtttggtttggtgttgggtgtttgtaattttagttagtcgggaggttgaggtaggagaattttttaaatttaggaagtagaggttgtagtgagtcgagatcgcgttattgtattttagtttgggtaataagagtgaaaatttattttaaaataaaaaataataataaataaataaatatagatgataattatatgtattagataagggtttgagggggaatttagatagagtttattatgatttggtatatagattttagttaataaatatttgttgaatgaatgagtgacggttataaagaaatatttacggtgttaattatggtttggataatattagtagttattatattttaaatgtttattatatatagtattttgtaaagtgttttgtatgttttgtttattttgatttttttttttttttttttgatatggagttttgtattgtagtttaagttatggtgtagtggtacgatttcggtttattgtaatttttgtttttggggtttaagtaatttttttgttttagtttttagagtaggtgggattataggtgcgttattacgtttagataattttttgtattttagtagagacggggttttattatgttgtttaggttggtttggaatttttgattttaggtgatttattcgttttagttttttaaagtgttgggattatagatatgagttatcgcgtttagattattttgattttttttaaaattatatttggtaggtgtaatatttttagtttatatttgaggaaattgaataaggttgaaaagaggtaatttatttatagttatgattggtagagttgtaatttgtatttaggagtggttttatttatattttttttgatttatattttgtttttttagattagtgttttttagatagtggtttttgttttataggggatatttggtaatgtttggagatttttttggttgttataattgggggatgtttttggtttttaagggtaaaagttaatgatggcgtttaatattttataatgcgtaggataattttttataataaag

SEQ ID NO: 2171 - DNA, 5316 bp, Artificial Sequence
  chemically treated genomic DNA (Homo sapiens)
taagatttagatgtggggtttttaatttgatttttttttagatttttaagatttggattttggaatattagatattatttttaattttaatttttttttttggaattttatttttttttttttttttttttgatatggggttttattttgttgtttaagttggagtgtaggtgtatgatttcggtttattgtagtttttattttttaggtttaagtgatttttttattttattttcgggagtagttgggattataggcgtttgttattatattcggttagtttttatattttttgtagagatagggtttcgttatattgtttaggttggttttaaatttttgagtttaagtgatttattttttatggatttttaaagtgttgggattataggcgtgagttatcgcgtttagtttggattttatttttgaatttttaatttaattttgattttggaatttatattttagattttatttttatttttattttttaggatttattcgattttgttattttgattttagtttttttttttatttggggataaggtatagtttgtggttatagggttgttagggaaggttgggagtttggtaagattttttagtttggttttgtttttttagggatttttttatatgtggattgatatttttttttaagatgtgtttgttttatttttagttgatattaagtttcggtagttaattaggtgagagttttgtcgtttttttttaaggcgggtgtatattttggtttatttgtataaggtttttttgaaaattcgggtttttagtgaagtaggtagaggttgtttattataggttttttagttaggtgttattaaattttttgttatttaaaagtattgtaagttgagtgttttttgtaaattgagtttaagtattttttggtaagttttttttttatttaagtttatttgagtggagttgtgtgtgggttatagttattttatatagggttgaatgtagatgttcggatattagtagtttgttattttttgtttttgggttttgttttttttggtgtcgtttttagggagttttttgtagggttgggggtaaagtggtatttaatagtgcgaggtttatattttagttaggttatttgagtagaaataaatattttttttttagttatagtaaaagttttagggttgatttagtcgattagtttgggttaaatgttgtgttttgaagaattaattattgtggttagggggttgtaatattcgaattggttagtttagtgatgttttttcgatttcgtttagttagggagggaggggtttgttttattagaattttatagattgatagtggtggtggggaggggtggttggggtgggggtgggttattagtagaaaattacggtgttgttaataaatgaggggaaattgatgttgggttggagaaaatagttatttaggtaattttatggtttttaaagatagggttatatgcgggtagggtttagagtgtcgtagtttttttgttttttaggcgttgtatgtttttgttttttattttttatttttttttttttttttgtagattggttttttgtttatttatttttttatatttttaaattttggtttgtggtagttttagttttgtatttgatgttatattatgtaatagtgtagcgttttgattttaaatttacgggaaggagaatttcgttggttttatagattatttttggggttatttgttgtggttagggtggttagtgatatttggggtttttttttatgggattataggtattggatttttttgttgggtatataggtgtttagtgaatgttagtggtttcggtttaggttttttttgttttttgtagttttttttagggttttattcgagagtttgaagttattttttaatgtgttttttagttatgagtttagagttgttatttggaatacggaggatgtggttttggacgacgagaatttatttatcggagagatgtcgagtgatatttatgtgaagaggtaggttgttggtcgggtggggtaacggcggtgtattagggggattgtaaatgggtgtgggttttcgggttgagtttagagtttcgattttaggtttttcgtggtgttgagagcggggtgaggagtgggttttttatgtagttttagttttgacgtttatttatttcggttttagttgggtgaaggggttggagtatgataagtaggagatagacgtttattttaattttttgattggggaggggaattttaattggcgttttgtgtttcgttttgattatttgtttacggagcgggaggtgagcgttcggcgtaggtttggattttttgttttggaggaggcggagtttcggtagtttgtagtgttggttttgtaggtttgggattatgatcgtatttttgttaatgatttttttggtattataatgtttagttttttttatttttagtttttgttttcggtttttattttcgtttttgtttttagtttttattttcgttttttagttttttattttgatttaattttgaattttgggattttggattcgaggtgtgaaatttttgttttttggtttaattattgagttaattaggtttagattatagtaatttttatttttatttagagtttttgatttaattttgatttgattttagtttgttattttgatatcgattttatagtttttggtttttggtattttgatttcgatttttggtttttttttattgggaagtagtaatgggtggatcgttgggttgtggtttgggtggtttatagttgtggtttgatcgtatattgtaataatttttaatgttttaatttataattttggtgtgttgtttttttatttttggtataatgagattttgattttatgtttaatttggtgtgttttggatttgtaggatttttggagttgtagttattagatatggtgcgtggggttcggggtttcgagttttgttttgtgtagttggttcgtaatggggtcgggtcgaggtgtaatttgtttcgttgttgtcgtcgtttgaggggttggtggtcggtagtgaagttgaaggaggtagaggacgtggagcgggaggcgtaggaggtttaggttggtaagaagaagcgaaagtagaggaggaggaagggtcggttagaagatttggagtttatagatatgggtggtaatgtgtatatttttacggtgggtgttcgtgggtagaggttaggttgagttggggtttgagttcgttttttgtttttagtgatgtaggaatgttttttttagggtaaggtggaggtagagtttgagttgttgattgtggaggaggtcgagaaacggttagtggggaaggggcggaagtagttagagtttttggagaaatttaggtgagttaggtatcggggttggggttatagtttgggtcgatggggaggtgggggtggttaaggggttttttttttattttgatattatttttttttttaatagtcgttttaaaattttttttaattggtttgtgaattcgttgaagatttttgttttttttatttggcgtcggtattggcgtattttggtgttgttgttattggtgttgtttatcgtttttttttttttggttttttatattatttttggttagattagttaggttatttttcgttttttttataagtgattttcgttgattttggatatttatttagggtgttaattttttaatgtttgtttttggaagttttttttatttatgtgagttattttagagtttagtgttttttttgaataaatttattatagttattgatttgtgattacgtgttatataaggtcggtattaggtggtaaagaatagagatgtttttgggtgattttaggtgttggggatttgaagaatgtatagggatggaaggttgtttttatttttattatagggaagaaaagggtttcggtagttgagttattatatttattttattattgtttttgtttttgttggtggttaggttttttttatttaatttgtttttggtttttatttttttaggatagttaaggatttgacggattttattaatttgtttattttttattatttttgagagaggtttttattagagttaaaagttttgttgttattatttgatttcgtttttttttttttttttttcgttttttttttgttatagttttgtattaatattcgagatatgatttgataaattgattggttgtttaggtatttttggttttttaggttgtggattggtgaggttgttgggttttggttttttatatggatttagagttttaatgggaaattttgattaggttttaagttaggggtttggtgttggttttgttttagaatggttattgattgttattttcgtattttagtgtttagttttgtttttatttagattgtagaggatttggagggatttttttttgtagtgagagttagcgtggggtttggtatagagtgggattagtgagtgtgataggattaggtgtattgagtttagggtggcggagagcggttttagttttatttattaatgaagaagtggtaagttttaatatgtatttagggttttgaattagtggtttggggttgattatttatgagtttgggggttatggtggttttaggaagtttacgttgaaaaggtttatttgagttttggggttgaattcgagaggtttgaggattatagtggaggagggatttaggatagggttgtgggttggatatgaatttggtttgaataaatttcggttaattaggggatgtttatgtggggttttcgagggttttgggtttcgatttgttagttataattgtttttaatgagtggttaggatgaggttttggttatggtaaggattatacggagattagtgagtattattataattaattaatagatttattaatttggggttggggttgatcgaggaggtggagggtggtagaggttgggggataattataggttagggagaaagaggagatagaggaagtatcgagggtgattacgttgttttttttagattaatttttttttggatggttcgtgttgagtggtagatgagcgaatcgatgagtttagttattgggagagagataagggttggtattggtttagtgggggttttggtttttgacgttgagagttttgttatttaattggttaggttagtatttgtttttttatttttaattaaatttggggtatttaggttttattttttttattttatagtttatagacgttttgggttttttatt

SEQ ID NO: 2172 - DNA, 5316 bp, Artificial Sequence
  chemically treated genomic DNA (Homo sapiens)
ggtaagaggtttagggcgtttgtgagttgtggggtggggagggtaaagtttgggtgttttaggtttggttgggggtgaaggggtagatgttggtttggttagttaagtgataaggtttttagcgttaaaagttaaggtttttattgggttagtgttagtttttgttttttttttagtggttggatttatcgattcgtttatttattatttagtacgagttatttagaagaaaattgatttagggaagataacgtagttattttcggtgttttttttgttttttttttttttttggtttgtggttgttttttagtttttgttattttttattttttcggttagttttagttttaggttgataaatttattgattgattgtgatagtatttattggttttcgtgtgatttttgttatggttagagttttattttggttatttattgaaggtaattgtgattgatagatcggggtttagagttttcgggagttttatatgggtattttttagttaatcggggtttatttaaattaggtttatgtttagtttatagttttgttttgggttttttttttattgtggtttttaggtttttcgggtttagttttagggtttagatggatttttttagcgtgagttttttggagttattatggtttttaggtttatgagtgattaattttaggttattaatttagggttttgagtgtatattggggtttgttatttttttattgatgggtaaagttggggtcgtttttcgttattttgggtttaatatatttgattttgttatatttattgattttattttgtgttaaattttacgttggtttttattgtagagaggaatttttttaggttttttgtagtttagatggaagtaaaattgaatattgaggtgcgaaagtagtagttagtggttattttggagtagggttagtattagatttttggtttggagtttaattagggttttttattagaattttggatttatgtggagaattagggtttagtaattttattagtttatagtttagggaattaggggtatttaaatagttagttagtttattagattatgtttcgaatgttgatgtaagattgtggtaggggaaaagcgagagagaggggaaaggaagcgaagttaggtagtgatagtagaatttttagttttgatggaagttttttttagggatggtgaggaatggataggttaatggagttcgttaggtttttagttgttttggaggggtggaagttagaaatagattaggtgagagggatttggttattagtaggagtaggagtagtggtggagtgggtgtgataatttagttgtcggggttttttttttttttgtggtggggatgggggtagttttttatttttgtgtattttttaagtttttagtatttgaggttatttaagaatatttttgttttttgttatttggtgtcggttttgtatagtacgtgattataggttagtggttgtgataggtttatttagaggaagtattagattttggggtagtttatatgggtaagaaagatttttaggagtaggtattgaagggttggtattttgggtgagtgtttaaggttagcgagagttatttgtggaggggacggaagatgatttggttgatttggttagggatggtgtagaagattaggaggaggaagacggtgagtagtattagtagtagtagtattagggtgcgttagtatcggcgttagatgaagaagataaaggtttttagcgggtttataaattagttgaaggaagttttggggcggttgttgaggagaagagtggtgttaggatgaggaggaagttttttgattatttttatttttttatcggtttaggttgtggttttagtttcggtgtttgatttatttgggtttttttagaggttttggttgttttcgttttttttttattggtcgtttttcggttttttttatagttagtagtttaaattttgtttttattttgttttaaaaaagatatttttgtattattgggagtagggggcgggtttaggttttagtttagtttggtttttgtttacgggtatttatcgtgaggatgtatatattgttatttatgtttgtgaattttaggttttttggtcggttttttttttttttttgttttcgtttttttttgttagtttgagttttttgcgtttttcgttttacgttttttgttttttttagttttattatcggttattagttttttaggcggcggtagtagcgaaatagattgtatttcggttcggttttattgcgggttagttgtatagagtagagttcggggtttcgggttttacgtattatgtttggtagttgtaattttagggattttgtaagtttagagtatattagattaggtatgggattaaagttttattgtgttaggggtgaggaggtaatatattaaggttgtaaattggggtattgaaagttgttgtagtgtgcggttaggttatagttatagattatttagattatagtttagcggtttatttattgttattttttagtggaagagggttaagggtcgggattagagtgttaaggattaaaggttgtggagtcggtgttagggtgataagttagggttaaattagagttgaattagagattttgggtgggaatggaggttattgtggtttaggtttaattaatttagtaattaggttagaaagtaaaggttttatatttcgggtttaaaattttaagatttaaggttgggttagagtagggaattgggggacggaagtgagggttggaggtaggggcggaggtgagggtcggaggtaggggttgagggtggggaaggttaagtattgtaatattaaggaagttattggtagagatgcggttatagttttagatttgtaggattagtattgtaggttgtcggaatttcgttttttttagggtaaagggtttagatttgcgtcggacgtttatttttcgtttcgtgggtaggtagttaaagcggaatataaagcgttaattgaagtttttttttttagttagggagttgaagtgaacgtttgttttttgtttgttatgttttaatttttttatttagttggggtcggggtgggtgagcgttagggttggagttatatggagaatttattttttatttcgtttttagtattacggagggtttggggtcggggttttggatttagttcgagggtttatatttatttgtaatttttttagtgtatcgtcgttgttttattcggttagtagtttatttttttatatagatgttattcgatattttttcggtgagtggattttcgtcgtttagaattatatttttcgtgttttagatgataattttgagtttatagttggggggtatattagggggtggttttagattttcgagtggggttttaaaaggggttgtaggaagtaggagggatttgggtcggggttattgatatttattggatatttgtgtgtttagtaggggaatttaatgtttgtggttttatgaagggaagttttaggtgttattgattattttggttatagtagatggttttaggaatggtttgtggggttagcgaggttttttttttcgtgaatttagaattagggcgttgtattgttgtatggtgtggtattagatgtaaagttggagttattataagttagagtttggggatgtagaaaagtgagtgaatagaaagttagtttgtagggagaagagggaggatgagagatgggggataggagtatatagcgtttgagggataggagggttgcgatattttggattttattcgtatatagttttgtttttgggggttatggggttgtttggatagttgttttttttagtttagtattaatttttttttatttgttgatagtatcgtgattttttgttggtgatttatttttattttaattatttttttttattattattgttaatttatggaattttggtggggtaggtttttttttttttggttggacggggtcggggagatattattggattggttaattcgagtattatagttttttaattataatgattggttttttagggtatagtatttgatttaagttggtcggttgagttagttttgaggtttttgttgtaattgggaaagaggtgtttgtttttgtttaagtggtttggttgagatgtaagtttcgtattgttagatgttattttgtttttagttttgtagagggttttttgagagcgatattaaggaaagtagagtttagaggtagaaagtgataggttgttgatattcgagtatttgtatttagttttgtgtgaagtggttgtgatttatatataattttatttagatgagtttaggtgggaagggggtttattaaaaggtatttggatttaatttataagagatatttaatttgtaatgtttttgaataatagggaatttaatgatatttaattgaaaagtttgtgatgagtaatttttgtttgttttattggggattcgggtttttagaggagttttgtataggtagattaggatgtgtattcgttttgggaggaggcgatagaatttttatttgattggttgtcgaggtttgatgttaattgggggtggagtaggtatattttgaggaaagatgttaatttatatgtgaagagatttttggggggataggattaggttggagggttttgttaggtttttaattttttttgatagttttatggttataggttgtgttttgtttttaagtggagaaaagagttagggttaaaatgatagggtcgggtagattttgggggatgaggatgaaggtggagtttgaagtgtgggttttaggattaaggttagattaggggtttaaggatgaggtttaggttgggcgcggtggtttacgtttgtaattttagtattttgggagtttatggagggtagattatttgagtttaggagtttgagattagtttgggtaatatgacggaattttgtttttataaaaaatataagaattagtcgagtgtggtggtagacgtttgtaattttagttattttcgaggatgaggtgggaggattatttgagtttgggaggtggaggttgtagtgagtcgagattatgtatttgtattttagtttgggtaatagagtgagattttatgttaaaaaggaaaaaaaaaaaaaatgaggttttagaaggggaagttgagattaaaagtaatatttggtgttttaaggtttagattttagggatttggggggaggttaggttaggaattttatatttgagttttg

SEQ ID NO: 2173 - DNA, 10480 bp, Artificial Sequence
  chemically treated genomic DNA (Homo sapiens)
gttatagtgagttatgattataatgttgtattttagtttggggaatagaataagattttattttaaaaaaagaaaaaataaaggtaaacgtaaattttaagtattttattttttatttagttaaaatatatatatatatatatatatatatatattaaggagagaagtatataattaatgtaaaataaaaattttaaaaatttagttggtatggtagtatgtatttgtagttttagttatttaggaggttgagtggggaggattatttgagtttaggagtttaaggttgtagtgagttgtgattttgttaattcgttttagtttgggtgatagagtgagattttgttttaaaaaataaaaaaaaatttttaaaattttttttttttatatggatgatagttatttttataaatttttttttttttattttttttatttttaattattttaaattttattgtgagaagatatttggattgtattgaatatagtaattgagagttttagttgttgttttgaaatttattgttgaaatttgtattgaggttatattttttacgggttgtttttagtatagttgcggtaaaaatattttggtttttgtattttttaataattttgttgaattttttttaaaattgtacggtattttgagaagtttttatttattttttttttttttttttttttttgattggaggttagatttgtattgtaattttatgggttttttagttttttttattgtttttttatttttttttataggtggtttttttaattgattttttttttttttttttttttttgagatggagttttgttttgtcgtttaggttggagtgtagtggcgtgatttcggtttattgtaaattttattttttaggtttaagtgattgttttgttttagtttttcgagtagttgggattataggcgtgcgttattatgtttggttaatttttttttttagtagagatggggttttattattttggttaggttggttttgaatttttgattttaggtgatttttttgttttggttttttaaagtgttgggattataggagtgaattattgtatttggtttttttaattgattttttgtatgttaattttttttttggtaattgtttttttgaagatttagattaaattgtgattttttttatttttttttttttattattgtatttatttttgttgaaagttgtaattgattggtttagaatggttagaaaatgttggtattttattgttttttatttatttttattttttgtggaaggaagtgaataaatattttgaaatgtattattgttttttattttaaggagaatttatgaaaatttttggtaaataagattattttaggatattattggtaatttattaggtaatatttaaagagtattttatatttgttaggtattatgttagttgtttatatttaaattttataatttggttaggtatggtggtttatatttgtaattttagtattttgggaggttgaggtaggcggattatttgagattaggagtttaaggtaagtttggttaatatggtaaaattttatttttattaaaaaatataaaaaaattagtcgggcgtggtggtatacgtttgtaattttagttatttgggaggttgaggtaggagaatcgttttaatttgggatggggaggttgtagtgagttaagattgagttattgtattttagtttgagtgatagagtaagattttgttttaaaaataaataaataaataaataaaaataaattttataattttgaggtagaattattattattttaattttatagaagaggaaattgaggttaagttgtttaagttatatagaggtaattggtagagttggaattaattttaggatagtttaatattaatgattgggtttttgttattatgttatgggtaataaatttagaatataagggttttatagattattttttttttatttttatagaggaaattgagatttttaggtgaatgattttgtgttatttaggaagttagggtagaagtaagatttgtatttaggtgttgattttaaatttttagttttattgttttagaaagtgagaaaattaaaagattagggtgatttttgttttataatggagaaaaaaatttaaatatagttattagcggggggattaaggataggaaagtagtttggagtatagtggtattaaagggtaattattggataattgttttttatttttaatttttttttatttttatttatttgttttaagttggagtttgtatgtgaggtttgaggaataatattatagatttatagaattatggagtgtttataggtagggtattaggatagtgagaaagaagtggagggagagaggattagttggaggaagtagttaggtttagtgagtttttttgtgttgggttttttattaagtattggttatttaaagttaaataagaaaaatttttttgtttttgaggattaggatagattgtatggaggagatgatatttgagtaggttttagagtttgaaaagatatagaggagggggcgaaaatttttggatttatatgtaattgtttatttgttagttcgatttaattttataaatatattttaaaggttttttttgcgttgggttttgttttaggtgttgggattatagtggtgagtaaattagttgtagtttttgatttttggttggagagtttgtttaggaagatagttaaataattttaatatagtgtgagatgtgttttatgtaaggaatttataaggtattgtgggataagggagtttaattgtttttaggttaaaagtaagttttaatttttgaatatgaaaaaattttttataatttaatgttatttttattttttagttttatttattattatttttttaaaagttgggaatataataaagtatgtgtgtgtgtttgtgtatgtgaatttgaatatgttaggtttttgtttatattgtttttgttttttggtatatggatgtttttttggagaaattttttttaatatatttagttttatttaaatttttttttgtgtttttaaggtaatttgtttttttaggttgtttatttgtttttttaggttggtaaagtttttaaagtaaggatttaaatgtaaggttaagagtatttattacggagttatatagatataggtgggttttgtttagttaagaggttttggtttttaagttgttttttttatttagatgaattgttattattttaggaaatgtaattagtattgatgtttagtttttggtatatggtaggtgtttaaaaatgttttttgagttgaattgtattaatattaaggttataggttagaatttgtattttatgaaggttttggttatgagttggatttgggaagggtttatgattaattttagtagttttttgtggttaaaaatgagaaatataaattatgttttttgttttgaagatttgtttgttagtgggagaaatagatggttaagtttttaatagtataattttaaatttttagagtagtggtttttaaattttagtaagtagattagaattatttaaaggttatttgttaaaatagatggttggttttagttttagagtttttgatttaaaggtttggagtaagttttgagaattcgagtttgtatttttaatttatttttaggtgatattgaagttgttggattgataagattttttttttgattaaatattggttaggtttttttgagttttttttttgattaggtttgagtgtgggtttttatgttattttttgtggaattttattttagtaagaaatttgttaagttagtttagttagaattttttatttttgatatttgattattttttatatttggttttgatttatatcgttattattttttaggtgatgtttagttattttgatttgttttgggtaggaattttgttaggttaatttagttagatttttcgttaatgtttttttttagtaattttttatttattgatttttatatattgttttttagttataaattattattttgttatatttagtttaatcgttttgatttatggtaaaattttatttttatttttgttagattgggtttgaataaagtttgttttattatttttaaatatgaataattaagtgttatgaatagttttttttttaatgggatttatattttgagaattattgattagaggttaagggttttgtgtttattatttggtatatattaatgataggtttttgagtttgaattttggttaattatattgttagttttggtttttttttttttttttttttgagatagggttttgtttaggttggagtgtagtgatgtaattacggtttattgtagtttcgattttttgggttaagttattttgtcgttttagtttttcgagtagttggggttataggtgtaagtcgttatgtttagttaatttttaatttttttgtagaggtggggttttattatattgtttaggttggttttgggtttttgggtttatttatttcggttttagttttgttttttgattaaattatttatttttttgtgtttgatttattttatttgtgaaatttagatagtaagttagtgtatggtaagtgtaaaaagtaatatttggtataatgtttaataaatgttggttaaattttataattattttttgtaggaagtgggacgataaagttaagggtttaggtggttagagaagagtaaggattatgttttttttttgtgtagttaggtaggttttgtattttttttttgcgcgatttttttcgggtagtatcgggtttcgaatttttacgttttatttttaagtaggttttgtagtttagttttcgcggttttttatagttagtcgatgttgcgtaagcgtcgtatttacgttttagtatatgcgtatttaggtgcgtcggtaggggacgcgtcggtatagtaaaaatggcggcggtattacgggtggcggcggtcggggtaaggtttagcgttttggcgagcggttttcgcgtcgcggttcgtagtttttgtagttaggttatttttgttaacgaacgtatcgaaaataagcgtcggatcgcgttgttgggagggggttaacgtcgtattgacgcgtagtataagcgagtgagttttgaggggtttaagtgagtttcgtttttggcgttcgcgatttattattgcgtgttcggtttgcggcgttcgaggtttttttgttaattcgtacggtgtttggaggggtcggagtaagggtgtttattttgaaaatttgtagcgtttttcgtggaggcgggtataattagtagaagtatttgtgtgtttttttatattgtttaatttttgggatttagacggatttggttcgtttttagttagtttaatatttaatataagtttttgggtaatttattaaatttttgtgggttattttaataataattttttttttataagtgtatcgttagattatagatagtaaaatgataggcgtttagtaaaaattatgtgtttattttcgtgttttatgaaagagtgatggtaggtttttttttttttgtggaagtaggaaaattgaatttgggtatattttattaatatgaaatgggggatgtgcgcgtgtaggaatttgtggaatttttgttcgtagaatgtttggtcgagttttttagggttttagtatgtttcgttttgatgggtagtaaaggtacgtgtcggaagtaggtggtttttttgggagtgcgtaggttattttcgatgtttggttggattgagtagttgaaatattgttatttatcgtttgggttttgaggcgagaatttagttggtttttagagataagttgggcggtttattttggagaggtgatttttgatttgaaattaggtttgtttagtgtgttcgtgattggtgggtgagtttggatcgttgtgttgaacgaattaattaacgggaaggtgtagaagtgaaatttttatagatgaagagtatttaggtataatttataattatgagggaggtattgggggagggatggggttttaaagtgaggagatttgaatagttttatatttgtttaatattgatttagatgttataaattcgtatttgataagggtttaaaggtaatagttttttttgatatttgagagtgaaatgtaaatttagtgatggtttgtggtgttaggagtgtttttttttttttggggttatttttaatttattttgttagggttgagggagatgttagattattttttggaaaggtttgttagtgtttttgtatattttttttgttggggtttattgtttaatttttttttggaatatcgtttagtttttttttaggtagattttattaggtttagatgaagtttttagaagttgttttttttttgttaaagttaatttaggaggttgatttaatatgaatttttttttgtatttttttttatttttatgttttgatacggagttttgtttttgttgtttaggttggagtgttatggtgcgattttggtttattgtaatttttgttttttaggtttaagttatttttttgttttagttttttaagtagttgggattataggtgtttacgattatgtttggtaattttttttttgtatttttagtagagatagggttttattatgttggttaggtcggttttgtacgtttgattttaagtgatttatttattttggcgttttaaagtgttgggattatgggtgtgagttattgtattcggttttgtattttttttaaaataatttttgattattttcgtagatttttttagaagaggaattagtgggttaaagggtgtaagtttatttattttttttgagatagagtttattttgttgtttaggttagagtgtagtagtttattgtaatttttgttttttagttttaagtaatttttttgttttagtttttagagtatttggggttataggtatgtgttattatatttggttaatttttgtatttttagtagagatggagttttattatgttggttaggttggttttgaatttttgattttaggtgatttattcgcgtttgttttttaaagtgttgggatgatagaatttttttttttttttttttgagatagggttttattttgttatttaggttggagggtagtggtgtaattatggtttattgtatttttgattttttgggttttagtgatttttttattttagttttttatttagttaatttttttttttttttttttttggtagagatagggtttcgttttgttgtttaggttggttttaatttttgggtttaagtagtttttttattttggttttttaaagtgttgggattataggtgtgagtcgtagtgtttggttagtataaatatattttaaaaatttgtatatatgttgttaaattggttttttgaaaatttattttattttatatgatagtgtataggattgtttgttttttgttttgtttttttttttttaaatgtaattttattagttttggttatttttttaaggggaaaataatagttaatttgaggtattttttgtttgtttttgtttttttcggggagggggggataggatagtaggttagggtatttgtttcgggttgagagtttgggagtttaagtaatggaggtttttttttttttttttttttttttaagatagagttttgttttgttatttaggttggagtgtagtggcgcggttttggtttattgtaagtttcgtttttcgggtttatgtcgtttttttgttttagttttttgagtagttgggattacgggtgtttattattatatttggttataattttggagttttagtatagacggggttttattatgttagttaggatggtttcgattttttgatttcgtgattcgtttgtttcggttttttaaagtgttgggattataggcgtgagttattgtatatggttttttttttttttttaagatagggttttattttgttgtttaggttggagtgcggtggagtgatcgtggtttattataatttttgttttttaggtttaagtgatttttttgcgttagtttttgagtagttgggatttaaggtacgtgttattatatttggttaatttttgtatttttagtagagacggggttttattatgttgagtaggttggtttttaatttttgattttaggtgatttttttatttcggttttttaaagtgttgggatgatagaattttttttttttttttttttttttgagatagggttttattttgttatttaggttggagggtagtggtgtaattatggtttagtgtattttcgatttttgggttttagtgatttttttattttagttttttattttgttagttattttattttattttattttttggtagagatagagtttcgttttgttgtttaggttggttttaatttttgggtttaagtagtttttttattttggttttttaaagtgttgggattataggtgtgagttgtagtgtttggttagtataaatatattttaaaaatttgtatatatgttgttaagttggttttttaaaaatttattttattttacgtgatagtgtataggattgtttgatttttgtttgttattttaaatataattttattagttttggttatttttttaagggggaaataatagttaatttgaggtatgtggttttttttgttgttgttggggaaggggacggtaggttagggtatttgtttggggttgagagtttgggagtttaagtaatggcggtttttttttgtttgtttttgttttttgagatagtgttttattttgttatttaggttggagtatagtggtgcgattttggtttattgtaatttttgttttttgggtttaagcgatttttttgttttagtttttcgagtagttgggattataggtgggtgttattaagtttagttaattttttttgtatttttagtagagatagggtttcgtcgtgttagttaggatggtttcgattttttgattttatgattcgtttgttttggttttttaaagtgttgggattataggtgtgagttattgcggttagtttttttttttttttttttttttttttttttaaaagataggttttcgttttgttgtttaggttggagtacggtggagtgattatagtttattataattttcgttttttaggtttaagtgatttttttgttttagttttttgagtagttgggattataggtacgtgttattatttttagttaatttttgtattttttagtagagattaggttttgttatgttgtttagttggttttaaatttttgggtttaagcgatgttcgttttagttttttaaagtgttgggattataggtgtgagttattgtgtttagtcgaggtttttggtagattgagagttttgattttatttttttaaagaagtttttttttttttttgggacggagttttattttgttgtttaggttggagtgtaatggtgtataatttcggtttattgtaagttttgttttttgggtttaagcgatttttttgttttagttttttgagtagttgggaagataggcgtatgttattatattcggtttattttgtatttttaatagagatggggtttttttatgttggttaggttggtttcgattttttgattttgtgatttattcgtttttgttttttaaagtgttgggattataggcgtgaattatcgtgttcggtttaaagaagtatttttaaattttttttaagtgagttttttagtattttgtgttttattttttttttatttagttattttttgttgtggggttatttttgtgttatagtgttattgttaggtgtggggtttttaaataggggataggatagtaggagaaggagaagtttatagaggaggtaggagaagaattaggaagtagcgtgtttttgaggtgggagttgggagtagtagggattttcgtgaggtgaggtgtgtttttgtaggtttttttagaaaaaatttgtgttagattttttattaagtttgttttagtttttattatttgtttttgtattttttttatggttttttaggtttttagtaagtatttgtggaattaattaattgtgttttagggttaggttttttttatttttatttttttttatttttttttcgttttatttttttatttattttttatagttgggtggtttttggcgtatattgtttgttttgatttttatgttatttaaagtttattaataatatttatttgttttgggtaggttggatagaatgaaagtatttgtattgagattaacgggtaaatttgttttttaagtttttttatgaatagtttttgttttgtttattaaattgtttgtgatgatattattgagtgatttttgttttattgtagg

SEQ ID NO: 2174 - DNA, 10480 bp, Artificial Sequence
  chemically treated genomic DNA (Homo sapiens)
tttataatggaataaagattatttagtgatgttattatagataatttagtaagtaaagtaagggttgtttatgggagggtttgaagggtagatttgttcgttgattttaatgtaagtatttttattttatttaatttgtttaaggtagataggtgttattagtagattttagatgatatggaaattaggatagatagtgtgcgttagaagttatttaattgtggaagatgaataaggaaataggacgaggaaaaggtagagagaagtggggataaggagaatttgattttggaatataattaattagttttataaatatttattggagatttaaggagttataaaaagaatgtagaagtaggtggtggaaattaaagtaggtttagtgaaggatttgatataggttttttttagggagatttatagaagtatattttattttacgagggtttttattgtttttagtttttattttaaggatacgttattttttggttttttttttgttttttttgtgggttttttttttttttattattttattttttgtttagggattttatatttgatagtgatattgtgatatagagatgattttatagtagggagtggttgagtagaaggggagtgggatataaaatgttaaagagtttatttgagaagagtttaaaaatgtttttttgggtcgggtacggtggtttacgtttgtaattttagtattttgagaggtagaggcgggtggattataaggttaggagatcgagattagtttgattaatatggagaaattttatttttattaaagatataaaataagtcgggtgtggtggtatgcgtttgtttttttagttatttaggaggttgaggtagaagaatcgtttgaatttaggaggtagagtttgtagtgagtcgagattgtgtattattgtattttagtttgggtaataaagtgaaatttcgttttaaaaaaaaaaaaaagtttttttgaggagatgaggttagagtttttaatttattaggagtttcggttgggtatagtggtttatatttgtaattttagtattttgggaggttgagacgagtatcgtttgagtttaggagtttgagattagttggataatatggtaaaatttggtttttattgaaaaatataaaaattagttgggagtggtggtacgtgtttgtaattttagttatttaagaggttgaggtaggagaattatttgaatttgggaagcggaggttgtggtgagttgtgattattttatcgtgttttagtttgagtaataaagcgagaatttgttttttaaaaaaaaaaaaaaaaaaaaaaaaaaaaaagttagtcgtagtggtttatatttgtaattttagtattttgggaggttaaggtaggcggattatgaggttaggagatcgagattattttggttaatacggcgaaattttatttttattaaaaatataaaaaaaattagttgggtttggtagtatttatttgtagttttagttattcgggaggttgaggtaagagaatcgtttgaatttagggggtaggggttgtagtgagttaagatcgtattattgtattttagtttgggtgatagggtgagatattgttttaaaaaataaaaataaataaaaaaaagtcgttattgtttgggtttttaagtttttagttttaagtaaatattttagtttatcgtttttttttttaataataataaaaaaaattatatattttaaattggttattattttttttttaggaaagtagttaaagttggtgaggttgtgtttaaaataataaataaaaattaggtaattttatatattgttacgtaaagtagaataagtttttaggaaattaatttggtaatatatatatagatttttaaaatatatttatattgattaggtattgtagtttatatttgtaattttagtattttggaaggttaaggtgggaggattgtttgagtttaggagttgagattagtttgggtaataaagcgagattttgtttttattaaaaaataaaataaaataaaataattagtagggtaggaggttgaagtgggaggattattggagtttagaggtcgaggatgtattaagttatgattatattattgttttttagtttgggtgatagagtaagattttgttttaagaaaaaaaaaaaaaaaaaaaaattttgttattttagtattttgggaggtcgagatgggaggattatttgaggttaaaagttagagattagtttgtttaatatggtgaaatttcgtttttattaaaaatataaaaattagttaggtgtggtggtacgtgttttaaattttagttatttaagagttaacgtaggagaattatttgaatttgggaagtagaggttgtagtgagttacgattattttatcgtattttagtttgagtaataaggtgagattttgttttaagaaaaaaaaagaggttatgtgtagtggtttacgtttgtaattttaatattttgggaggtcgaggtagacggattacgaggttaggagatcgagattattttggttaatatggtgaaatttcgtttatattaaaattttaaaattatagttaggtgtggtggtgggtattcgtagttttagttatttaggaggttgaggtaggagaacggtatgaattcgggaggcggagtttgtagtgagttaagatcgcgttattgtattttagtttgggtgatagagtaagattttattttaaaaaaaaaaaaaaaaaaaaaaaaatttttattgtttggatttttaagtttttaattcgaggtaaatattttagtttattgttttattttttttttttcgaaaaaaataaaaataaataaaaaatattttaaattggttattattttttttttaggaaagtagttaaagttggtgaggttgtatttaaaaaaaaaaaaataaaataaaaaataggtaattttatatattgttatgtaaagtagagtaagtttttaggaaattaatttggtaatatatatatagatttttaaaatatatttatattgattaggtattgcggtttatatttgtaattttagtattttggaaggttaaggtgggaggattgtttgagtttaggagttgagattagtttgggtaataaagcgagattttgtttttattaaaaaaaaaaaaaaaaaaaaattagttgggtaggaggttgaagtggaaggattattggagtttagaaggttaaggatgtagtgagttatgattatattattgttttttagtttgggtgatagagtaagattttgttttaaggaaaaaaaaaaaaaaattttgttattttagtattttgggaggtagacgcgggtggattatttgaggttaggagtttaagattagtttggttaatatggtgaaattttatttttattaaaaatataaaaattagttagatgtggtgatatatatttgtaattttaggtattttggaggttgaggtaggagaattgtttgaagttgggaagtagaagttgtagtgagttgttgtattttagtttgggtaatagagtgaattttgttttaaaaaaaataaataaatttatattttttgatttattaattttttttttgggaaaatttacggaaatggttaaaaattgttttaaaaggggtgtagggtcgggtgtagtggtttatatttataattttaatattttgggacgttaaggtgggtgaattatttgaggttaggcgtataagatcggtttggttaatatggtgaaattttgtttttgttaaaaatataaaaaaaaagttgttaggtatggtcgtgggtatttgtaattttagttatttgggaggttgaggtaggagaatagtttgaatttgggaggtagaggttgtaatgagttaagatcgtattatggtattttagtttgggtaataagagtaaaatttcgtattaaaatataaaaataaaaaggggtgtaggagggggtttatattaaattagttttttaagttaattttggtaaaagaaaaatagtttttggaggttttatttaaatttagtaggatttatttgggaaagggttaggcgatgttttagggaagaattgagtaataggttttaatagaaagagtgtataggagtattgataggtttttttagaggatgatttaatattttttttagttttaatagagtaggttagaagtagttttaggggagagaaagtatttttagtattataaattattattaaatttatattttatttttaagtgttaaaaggaattgttatttttggatttttgttaaatgcgaatttatgatatttgaattaatattagataaatatagagttgtttaaatttttttattttaagattttattttttttttagtgttttttttatggttgtgagttgtgtttgaatattttttatttgtaagagttttatttttgtattttttcgttggttaattcgtttagtataacggtttagatttatttattagttacggatatattgggtaagtttggttttaagttagggattatttttttaaaatgggtcgtttagtttatttttgaaggttagttggattttcgttttaaaatttaggcggtgggtggtagtgttttaattgtttagtttagttaaatatcgagagtagtttgcgtatttttagaaaggttatttgttttcgatacgtgtttttgttatttattaaggcgaggtatgttaaggttttaaagagttcgattaggtattttgcgggtagaagttttataagtttttgtacgcgtatattttttattttatgttagtggagtatgtttaagtttagtttttttgtttttataaaggagaaagaatttattattatttttttatggggtacgagaataagtatatggtttttattgagcgtttattattttgttatttatggtttaacgatatatttgtgaaggaagaattattattaaaatgatttatagagatttaataagttgtttaaaagtttatgttaagtgttgagttggttagagacgagttagattcgtttaaattttaagggttaaatagtatgaaaaagtatataggtgtttttgttggttatattcgtttttacgagaaacgttataggtttttaaggtgaatatttttgtttcggtttttttaggtatcgtgcggattggtagggaggtttcggacgtcgtaagtcgggtacgtagtgataggtcgcggacgttaggggcgggatttatttaggttttttaggatttattcgtttgtgttgcgcgttaatacggcgttggtttttttttagtagcgcggttcggcgtttgttttcgatgcgttcgttaatagaggtggtttggttgtaaaggttgcggatcgcggcgcggagatcgttcgttagaacgttgagttttgtttcgatcgtcgttattcgtaatgtcgtcgttatttttgttgtgtcggcgcgttttttatcggcgtatttgagtacgtatgtgttaaagcgtgggtacggcgtttgcgtagtatcggttggttgtagggagtcgcgggggttggattatagaatttgtttgggagtaaggcgtgagagttcgagattcggtgttgttcgaggagggtcgcgtagagaaaaagtatagggtttgtttggttgtataaaaaagggatatagtttttgtttttttttgattatttagatttttaattttgtcgttttattttttatagaaaatgattataagatttaattaatatttattaagtattgtgttaggtgttgttttttgtatttattatgtattagtttattatttggattttatagatgaggtaaattaagtatagagagatgagtgatttgattaagaggtaagattgaggtcgaggtaggtgagtttaggagtttaagattagtttgagtaatatagtaagattttatttttataaaaaaattaaaaattagttgggtatggcggtttgtatttgtgattttagttattcgggaggttaaggcggtaggatggtttggtttaggaagtcgaggttgtagtgagtcgtgattgtattattgtattttagtttgggtaaaattttgttttaaaaaaaaaaaaaaaaaaaagttaagattgataatgtggttggttaggatttaaatttagagatttattattaatatgtgttagataatgagtataggatttttaatttttaattagtagtttttaaagtatggattttattaaagaaaaaattatttatgatatttaattatttatgtttaagaatggtaaggtaaattttatttaggtttaatttgatagaggtagggatagagttttgttataagttagagcgattgggttgaatatagtaaagtggtaatttatagttaaggggtagtgtgtggaagttagtggatggaaaattattaagaggaaatattggcggggaatttggttaaattgatttaataggatttttgtttaaggtaggttagggtaattgaatattatttgggggatggtggcggtatgggttaaaattagatatggagagtaattagatattaagaatggaggattttggttaaattgatttggtaagttttttgttaaaatggaattttataaggaatgatatgggagtttatatttaggtttagttaaagagagagtttagaagagtttgattaatgtttgattaaggagggaattttgttaatttagtaattttagtattatttgggagtgagttggaaatgtaagttcgaatttttagaatttattttagatttttaaattagaaattttggggttggggttagttatttgttttagtagatgatttttaggtgattttgatttgtttgttaaagtttaagaattattgttttaggaatttggaattgtattgttgagagtttgattatttgttttttttattaataggtaggtttttaagataaagaatatggtttatattttttatttttagttatagaaaattgttaaagttgattatgagttttttttagatttagtttatagttagggtttttataaagtataaattttgatttatgattttaatgttaatgtaatttaatttagaaaatatttttgagtatttattatgtgttaagaattaaatattagtattgattgtattttttggagtagtaatagtttatttagatagagagggtagtttagaggttaaagttttttggttaggtaaagtttatttgtatttgtataatttcgtaatgggtatttttgattttgtatttgggtttttgttttaaagattttattaatttagagaggtagatggataatttagagaggtagattgttttgggagtataagagagaatttgagtaaggttgagtgtgttgaggagagtttttttaagaaagtatttatatgttagggaatagaagtagtgtgagtaaaggtttggtatgtttagatttatatatatagatatatatatatattttgttgtgtttttagtttttggggaaatggtggtaaatgagattggaaagtgagaatggtattagattgtgaagagtttttttatgtttagaaattgggatttgtttttggtttgggggtagttggatttttttgttttatagtgttttgtaggttttttatataaagtatattttatattgtgttaagattgtttagttgtttttttagatagattttttagttaaaggttagggattgtagttgatttgtttattattgtggttttagtatttggaataaggtttaacgtagagaaggtttttagaatgtatttgtgaaattgaatcgagttagtaaataggtaattgtatgtgagtttagaggttttcgtttttttttttatgtttttttaggttttgaaatttgtttaggtattattttttttatgtagtttattttgatttttagaagtaaggaagttttttttatttaattttagataattagtgtttagtagaaaatttaatatagggaggtttattgaatttaattgttttttttagttagttttttttttttttattttttttttattgttttaatgttttgtttatgggtattttatagttttatagatttgtaatgttattttttagattttatatgtaagttttagtttggggtaggtgggtgggggtaggaggaagttggaggtaggaggtaattatttagtaattgttttttaatattattatgttttaggttgtttttttgtttttagttttttcgttggtggttgtgtttgagtttttttttttattgtgagataggagttattttgattttttagtttttttattttttgagatagtagagttgaaaatttggagttaatatttgggtataaattttgtttttgttttgattttttggataatatagggttatttatttaaggattttagttttttttgtaaaagtggagagggggtgatttgtgaaatttttgtgttttgagtttgttatttatgatataataataagagtttagttattggtgttagattgttttgaggttagttttaattttgttagttatttttgtgtgatttggataatttggttttagtttttttttttgtaaaattggaataataatagttttattttagagttgtaaggtttatttttatttatttatttatttatttttgagatagggttttgttttgttatttaggttggagtgtagtggtttaattttggtttattgtaatttttttattttaggttaaagcgatttttttgttttagttttttaagtagttgggattataggcgtgtgttattacgttcggttaatttttttgtattttttggtagagatggagttttattatgttggttaggtttgttttgaatttttgattttaagtgattcgtttgttttagttttttaaagtgttgggattatagatgtgagttattatatttggttaagttataaggtttaaatgtaagtagttaatataatgtttagtaaatgtgaagtattttttaagtgttatttaatagattattagtagtattttgagatagttttatttattagaaatttttatgagttttttttaaagtgaaggatagtgatatattttagagtatttgtttatttttttttataaggagtgaggatggatgggggatagtgaggtgttaatattttttggttattttaggttagttagttataatttttagtaaagatgagtgtaatggtaggaaggaggaaatggaagaggttataatttagtttgggtttttagagaagtaattgttaagaggggaattaatatgtaagaaattaattaagggggttaggtgtagtggtttatttttgtaattttagtattttgagaggttaaggtagggggattatttgaggttaggagtttaagattagtttggttaagatggtgaaattttatttttattaaaaagaaaaattagttaggtatggtggcgtacgtttataattttagttattcgggagattgaggtaggataattatttgaatttgagaggtggagtttgtagtgaatcgagattacgttattgtattttagtttgggcgatagagtaagattttattttaaaagaaagaaagaaagaaagaaattagttagaggaattatttgtgagaaaaagtggggagatagtgggagaagttgggaggtttatgagattgtaatgtaaatttgatttttagttaggaagagagggaaggaaggaaggtgggtgggagttttttagaatatcgtgtagttttaaggaaagtttagtaaggttgttggggagtataggagttaaagtatttttgtcgtagttatgttgggagtagttcgtggaaggtgtaattttagtgtaaattttagtagtgaattttagagtaatagttggggtttttagttattatgtttagtatagtttaggtgtttttttataatagagtttggggtggttaggagtaaagggagtgagagagaggaaatttgtgagaatagttgttatttatgtggagagaagagattttaaagatttttttttattttttgagatagggttttattttgttatttaggttggagcggattggtaggattatagtttattgtagttttgaatttttgggtttaggtgattttttttatttagttttttgagtagttgggattataggtatatgttattatattagttagatttttaagatttttgttttgtattaattatgtatttttttttttggtgtgtgtgtgtgtgtatgtgtgtgtgtgttttaattgaataaaaaatgaagtgtttaaaatttacgtttatttttattttttttttttttgagatagggttttgttttgttttttaggttagagtgtagtattgtgattatggtttattatagt

SEQ ID NO: 2175 - DNA, 5250 bp, Artificial Sequence
  chemically treated genomic DNA (Homo sapiens)
gttgtgttgtgtggatttttaatatgttttagttgtgaaattttttatattataaatatttaatatggaagtcggaaatgtataataggttaaattagagatgttatgggtgaggagggtttagagttcgttttttatagttttttttttttttttgtgaggggtgagtggaatttttttaaattttttagagtttagttgggaaaatacggattttgattttatatgatttttaagtattgttgttgagagtgtgtgtttgttttttttttttgagatggagttttattttgttatttaggttggaatgtagtggtgagatttcggtttattataatttttgtttttcgggttttagtgatttttttgttttagttttttgaatagttgggattataggtatgcgttattatgttaggttaattgtttgtatttttagtagagatggggttttttcgtgttggttaggttggttttaaatttttgattttaggtgattcgtttgttttagttttttatagttttgggattatagacgtgagttttcgtattcggtttagaatttttgtttttttattggtttttaggtaattaagaaatattaatatgtgttgtaattagattgttttttgaattttttattgtgagatttcgttaaagttatggttttgttttttgttgtttatttggaatgtagttattttttatatttattttttcggttatatttgttgtattttggttgtttttgcgcgtgttttttgttgtttttgttattgttttattttgtatggtattttataggttcgttaaagtttagtttatttatttttttagaattttttatggtaggttgttgggagaaattgggttatagtttattataggtgtaaaatgatatttgagaggtggttttgttattgattattttttttttaatatatgtttagtagattaagtgtggtggataggcgtattttggtttgggggatttagaggatttgtgtttggaattttttttgtttttttgggtttgttatgattgtttggtttttttttgtaggggttttgtatgagtagttcgaggaacgtttttattaattgtaaagtattgtattaatgttttgattatattttagatagtagatagtggttttggtttttttattggaattgtttatgtggtatttggttatgtataatttttttaattggattattatgtaggtttgatgataaattaaatattttaatattagggtgggggtttttttaattttattttaagtttttgaggaaattgttttttaggtaagatagttttataatttgtgggattacgtgtaaaatatatagggttttttgtttaaaaaggataaaaaaaaaaaaaatttgtgttttttttttttatggtttttttatttgttgtggtatgttttgtatttgttgtttgatgttgcgtttttttgggtaggggatgtttatgggaatgagtgtagatttttatgggcgtataattttgatttgatttttttgtttttgtgtttagattttagtcggggtggagggtagtagtggttatttagtaggaagagataggggagcgggtagttgaggttttatttttagaagtagaaaggttgagggaggtagaattgtataagagttacgtcgcgtgttttattatttttttaaatgtagaagtgatataaatttagaagattattatgaattttaagatagtgattttagagtatgaaattttaagagaagagtttttttttaagagtgaggtatgtttttgagattatgaagtggattttaggattagtatgaagtaggtgtttagtaagtgtttgatgattatgtgttgggagtatagataggaaaaggatttttagtttgaggatatatttagagaattggtaatagtagttgtttatttattgttgaaggaatgaatatgatttttttttcgattttcgtttatatttagttgggttgagatttttagtttttttatttataaaatgggaaagataataaaggtatttatatcggagaaaattatggaatgtattttatttttggtatgtagagaaagtttagtattatgaagattattatgttcggtgttagagatatagtaagtatttaataaacgtttgagttgaggttttttagagaatatgagattgtagtaaattggatgtaaaatttttttttatttttttaaattcgtttaattatttcgtattaggatatagttggtgtggttataaagtagggaaaaagtaatcgatatttttgagtaattgtaaaatatggagtggttttaggaaggtgtagggaggaagttttttttagtttgaaattattttagtgttcgatttttttttttttttttttttttaattttgtatttgggtttaattttttatatattttttaaaagaagagtagttttggatttaagaaaatttgagtttaaggagttttttaaaagttaggaggtttttatggtattcgttttagaaataattaacgtaatttataggtagcgtgagttatttttatgttttatttattgagtatatattgtaaagtttattcggcgggttaattgggggtttttagggattttattagtagggtggttgtttggttgttttttcgggtttttgttgaaattaatagatagtagttagttttgaggtttatttataaataagttgatagttagatgaggaagatttatgttttcggttagttttttgaaattgttgttaatgagtttttattggggtagggagtttttaaggataggaaaaatgggggttcgagggtattatttgttaagatttaaggtaattgtatttatatttttgtttgtgtgtttttaaaatttttttattttattatgattttttttttagagaattttgttttttgaggtaagtttgtaaattaatgtttgttttttaatattttgataagggatagttgcgggggaattattatcgtttttttacgttgtaaatgtaggtaatgaaaggatcggatgaaggtcgttggtgatttattgttttgacgttttatttgaattagttgttttttttttagaagatttagaatataagtatttggaatggatgggtcgtatttaggattttaaatgagttttgttttttttttttgtttttaatttatgtgtttttttaggtatttaaatttgttatcgttttattagtaaaatgggattttttattaatttggtgggatgagtttcgtcgggagtgatgtgtgtgttacggaattgtggttatgtatcgggatggttaatttattgatgttagatgttaacgaagtggtttcggttattgagtattacgttattgttgggtttagatataatacgattttatgtatggatgatagtattattaataataaatgttagtgatttaaacggggaataattttaaatgaaataaaaagtattttatattatatttattttgaaagatataattggttgaataaaatttgaatataggaaatatagtaatgggttgataattttggtggaatttgatgatgtgtgatttacgtttaatatagtgtgatttaagtttttaggagggttttttaagtgagtttggtcggaggttgttatttatagtgatttgtatttgttatagtagttttttttaagtttagttttgggattattttagggattattttatattttagcggggagatgggttaagtttttatttgattttattttaggtagagaggtttttatggaagtgtgggttggttgtggggggttgagatttagtttcgtttttttgatattttattttgtgttttttaaattttagtaagtagtttttatagtttattaaatttgattgaaggtttgatggtttgtaaagtaaattttttataattgttataaaggttttattgtttaagtatataatttagtaaaattgttaagttttttttattttttaaattttaagatttgttagggaagagaatagtggttagtggattgtaggagtaattgtatttagtttagaattttttggaggatatagggaaggttttggaaaggtggcggtattttatagggagagacgtggtgttttagggtttaatttgtttatgtttagatttttattttgtaatttattagtcggttgtgagtggttatataatttttgttttagtttttttatttgtatatgggttgtttatagtttttattttagagggtagtaatgatgttaagtttttagaatagtgtttagtatgtgtgtattttgtgtttattttatgttaagtattatagagagaaaaatgaataaaatagggagaaatttttgtttttatggagtttatatcggggtagggggcgggggcggtatagagtagataattaatatagtgattagtttttagttaggttaggtatttttaatttttgttaataagttatatatttgtttaagttagggtgtattttttttatgaattttgattgtgatttttgattatggggtgatattttatagttgtggtgttttgttaattagtagtttttggtatataaaatgtgttgttagtaggtgtttcggttaattttgtttttgatttatttgtttgttaagaaaagggtgttgtgttttgtaatagtagtaaaatgggttaaggtttagttagttggaagttgtgttaaaatttattatggttggttgagggttcgaagttttttagtatttattaataattatttgtttaatgattatttttttggggcgtgttgtagtgagttggtttaaagtataattgattttggtcgtgatttagagatttgttttttgacgttagtggcgagtttttttgggtgtagttgaggggtagggttatttttttttatagtatttaaagttgggaggttttgttattaagtacggtttttttattgggaatataaatttgttggcgggaagagttcggaaagaaatttgtggattttttttcgagattatttaaagagaagaaaggtaagtagagttttgtatttatattttgaaaaattataaagatgaatttattttttttttgagagtaataattatttggtaatgtatagttttggtaaaaggtcgtcgaatgtgtttgaaggtgtttgttgttgtttttgtttaggacgtttgcgttttttattttagg

SEQ ID NO: 2176 - DNA, 5250 bp, Artificial Sequence
  chemically treated genomic DNA (Homo sapiens)
tttgaaatagaaaacgtaagcgttttgaataaaaataataatagatatttttaaatatattcgacggttttttgttagggttgtgtattgttaaatagttattgtttttaggaaaaaaatgagtttatttttgtaattttttaaaatgtaaatgtaaagttttatttattttttttttttttggatgatttcgaagggagatttataggttttttttcgggtttttttcgttagtaagtttgtgtttttagtgggaaggtcgtgtttggtggtagaattttttagttttaaatattgtggaaaagaatagttttgttttttagttgtatttagggaggttcgttattgacgttagggggtaggtttttggattacggttagggttagttatgttttgggttaatttattgtaatacgttttagggagataattattgaatagatagttgttaatgaatgttgggagatttcgagtttttaattaattatagtgagttttgatataatttttaattgattaaattttgatttattttattgttgttgtaaaatataatattttttttttaataggtaggtgggttaaggataaggttggtcggggtatttgttagtagtatattttgtgtattaagagttgttggttggtaaaatattatagttataagatgttattttatagttaaaggttatagttaaagtttatgggaaggatgtattttaatttgggtaaatatgtggtttattggtaaagattggaaatgtttaatttaattgggggttaattattgtattgattgtttgttttgtgtcgttttcgttttttgtttcgatgtaaattttatgagggtagggatttttttttattttgtttatttttttttttgtagtgtttggtatagagtaggtataggatgtatatatgttgagtattgttttaagagtttggtattattattattttttgaggtggaggttatgaataatttatgtatagatagggaaattgaggtagagattgtgtagttatttatagtcggttggtgggttgtagagtgaggatttgaatatgagtaagttgggttttggagtattacgtttttttttgtgaggtatcgttatttttttagaattttttttgtgttttttagggagttttgggttgagtgtagttatttttgtagtttattggttattgtttttttttttggtaagttttagagtttagggagtggagggggtttggtagttttgttagattatatgtttaagtaatgaaatttttataatagttgtaaagaatttgttttgtaagttattagatttttagttaaatttaatgagttatggaagttgtttgttggagtttggagaatatagggtgaaatgttaaaagaacggggttaggttttaattttttatagttagtttatatttttatggaagtttttttatttaagatgaggttaggtggggatttggtttattttttcgttggggtgtgggatgatttttgagataattttaggattgggtttagaaagagttgttgtggtaaatataagttattgtgaatggtagttttcgattaaatttatttagagaatttttttgggggtttgggttatattgtgttgggcgtgggttatatattattaagttttattaaaattattaatttattgttatgttttttgtatttagattttatttagttagttgtgttttttaggataaatatgatatgaggtgttttttgttttatttgaagttatttttcgtttaggttattggtatttgttattagtggtgttgttatttatatataagatcgtgttgtgtttaaatttaatagtgacgtgatgtttagtagtcgaggttatttcgttagtatttgatattagtgaattagttatttcgatgtatgattataatttcgtgatatatatattattttcggcgagatttattttattaaattggtagaaagttttattttgttgataaaacggtaataggtttgagtatttgaaagagtatatagattgaaaataaaaagggaaagtagaatttatttggagttttaaatgcgatttatttattttaggtgtttatgttttgagttttttgggagagaaatagttagtttaagtaaaacgttagagtagtgagttattaacgatttttattcgatttttttattatttgtatttatagcgtggaaggacggtaatgattttttcgtaattgttttttgttaaaatgttaaaaagtaaatattggtttatagatttgttttaaaggatagagttttttggaagaagaattatgataaagtagaggggttttgaggatatataggtaaaagtatgggtatagttgttttaggttttggtagatgatgttttcgggtttttattttttttgtttttagagattttttgttttagtggggatttattgataataattttaaggggttggtcggaagtatgggttttttttatttgattgttagtttatttgtaagtaagttttaaaattaattattgtttgttggttttaatagggattcgaagaagtagttaaatagttattttgttggtgggatttttgaggatttttagttaattcgtcgagtggattttgtagtgtgtgtttagtgggtggggtatggaggtggtttacgttgtttgtgagttgcgttagttgtttttgggacggatgttatagagattttttagtttttggggagttttttaggtttagatttttttaggtttaaggttgttttttttttgaaaaatgtataaaaagttgagtttagatataaaattggggaaagaaggagaaagaaagatcggatattaaaatagttttaaattaaaagggattttttttttgtatttttttggggttattttatgttttgtagttatttagggatatcgattgttttttttttgttttgtgattatattagttatattttgatacgagataattagacggatttaaaaaggtaaagagaagttttgtatttaatttgttgtaattttatattttttaggaagttttagtttaaacgtttattaaatgtttgttatgtttttagtatcgggtataataatttttataatattgggttttttttgtatgttagaaatgggatgtattttatgatttttttcgatgtaggtatttttgttattttttttattttatagatgaggaaattgagggttttaatttagttgggtatagacgagggtcgagaaaggaattatatttatttttttaatagtgaatgagtagttattattgttagttttttagatgtgtttttaaattgagagttttttttttgtttatatttttagtatatagttattaagtatttgttgagtatttattttatattgattttagggtttattttatagttttaagagtatgttttatttttggaagggggttttttttttggagttttatgttttggggttattgttttgaaatttatagtgattttttaagtttgtgttatttttatatttgaagggatgatggggtacgcggcgtggtttttgtatagttttgttttttttagtttttttgtttttaaggatggagttttagttgttcgtttttttgtttttttttgttaggtgattattgttgttttttatttcgattagggtttgagtataagggtagggaagttaggttagagttgtgcgtttatgagggtttgtatttatttttatgagtattttttgtttaagggagcgtaatattaaatagtaaatgtaaaatatgttataatagatagagagattatgggagaaaggaatataggttttttttttttttgttttttttgaataaggggttttgtgtattttgtacgtggttttataagttatggagttattttgtttaagaaataatttttttaaagatttaagatggagttggggagatttttattttgatgttagagtatttggtttattattagatttatatgatggtttaattaaagaagttgtatatggttaagtgttatatagatagttttagtgggagagttagggttattgtttgttatttaaaatgtaattaagatattggtatagtgttttgtagttagtgagaacgtttttcgaattgtttatataaggtttttgtaggagggggttagatagttatggtagatttaaggaagtaaggggagttttaaatataagttttttgggttttttaggttagggtgcgtttgtttattatatttagtttattgagtatgtgttggggaagaagtggttagtgatagggttattttttaggtgttattttgtatttgtgatggattgtagtttaattttttttagtagtttattatgaagggttttggaagagtgggtgaattggattttgacgagtttgtagaatgttatgtaggatggagtagtgataaagatagtagaaaatacgcgtagggatagttaagatgtagtaggtgtgatcggggaggtgggtgtggggaatggttgtattttagatgaataatagaaaataaagttatgattttggcggggttttatagtggaggatttagaggatagtttgattgtaatatatgttggtgttttttggttatttggaggttaataaaagaatagaaattttgggtcgggtgcggaggtttacgtttgtaattttaggattatgggaggttgaggtaggcggattatttgaggttaggaatttgagattagtttgattaatacggagaaattttatttttattaaaaatataaataattagtttggtatggtggcgtatgtttgtaattttagttatttaggaggttgaggtaggagaattattggaattcgggaggtagaggttgtggtgagtcgagattttattattgtattttagtttgggtgatagagtgagattttattttaaaaaaaaaaaataaatatatatttttaatagtagtgtttggaggttatgtaaagttaaggttcgtgtttttttaattgggttttaagggatttagggggattttatttattttttatagaggagagagaaaggttgtaggagacgggttttaagttttttttatttatggtatttttgatttgatttgttgtatattttcggtttttatattggatgtttgtggtataaggaattttatagttggaatatgttgaaaatttatatagtataat

SEQ ID NO: 2177 - DNA, 5397 bp, Artificial Sequence
  chemically treated genomic DNA (Homo sapiens)
gtgattatagatttttgatggtgtgtttatgtgggaaattgtggttgtgttttagaaaataattgagtttggatgaatagttaaggtattgtataagaatttgtgatggtatgtataaaataatgtttacgagaagggaacggggattgtagttttgttattgtttgatggcgagtaagatagattgggtgattaaaattatatgtgagagattacgtgggtatgaaattatagtagaggttgttagggattgtggtaaagattgtgtaggtgataaattttattgtaggcgatttaacgtttgagaaatagatgatgtgtaaaattgtttatttgaggttgtagtgttagttaaagttgtaagattgtatgggtgcgaatttgattgtacgggagagaatggttgggagattaaattagtgatcgagattaaagatataagaaggtgtaattgtgtgtacgaaagtaggcgtgagagattgtagtaaagattgagaaaaacgaatggttgtgattgggagagtgtgataggttgtgtgtgtgtgtgtgtatatttgaaattagttgtaaatcgatttattattattattatagtttattttataggtttagggattgtgagaaagtaggagagaaaatgacggtgagtcggacggagttattgatatggtgtgagagattatattattgggtatgtaagggagagggataaggaattgtttatgagagatttggtagtagtagtaattggaagttagaaattgtgggagaggaatttgataattgagtgatgttagagtattagggggtttgtgaaatagtttataagaaattataaattaggggttatataaaagagttgagtaaatgagatatgttaagtgattacgtgatagtgtgtgagaaatttgtaaagttgtgtacgtgtgttcgtgatgagttgattatatgaagaaaatgacggtgtgtacgattgagagggtatgggtgattgtgggtgatttatcgagggtttagtggtgattgtgaaatattgatcgagtatattagaagttgattgagggatagtgatgattgagatagtggttgagaaacggattgtgtgtttatgggtaaattttttgtaagagattttatgaaaggttgtaaattaaggattgagggtattggaagttgattgagaagaaacgtgagattaggtgacgatagtgtttgagatattgtgtgattgtgtatgcgtgtgaatgtttttgtgggagaggttgtaattagggatcgtgggtgtgtgaaaaagtggtttgagtgagaaaggggtaggagaggtgatttttgtgtatgtgtgggaaattttatgagagattagttagtggtgattataaattagtgattatttgtgtatgtgagaaagtaataggttaaatgagtgtttaaacgttttatgagattgtgtgattgtacgtgtatgtaaggaattgattggtgagagaaattattggtaatattgattgaatgagataggttgttaaatatgattgtgtgtgtgaaattgttaggagattgtagtaaggttggaatttatgatatagaaaatgattatgagtgatagaatgtttgagaggttgtgtgattaagagaatatagtagaggttgtaaattcggattgggtgcggtggtttatgtttgtaattttagtattttgggaggttaaggtgggaggattatttgaggttaggagtttgagattagtttgggttatatggtgagatttcgttattattaaaaatttaaaaaattagtataacgtagtgttgtgtatttgtaattttagttatatgggaggttgatgtgggaggattatttgaggttaggattttgagtttgagattaatttgggtaatatagaaggattttgtcgttattaaaataaaaaataaaattatttaggtatagtggtgtatgtttgtagttttagttattgaggatattgagttgggaggatcgttttagtttaggagtttgagtttgagattagtttgggtaatgtggtaaaattttgtttttttaaatagtttaaaaaattagttaggtgtggcgtgtgtttgtagttttagttattcgggaggttgaggtgggaggatggtttgagtttaggaggttgaggttgtagtttgcgattacgttattgtattttagtttgggtaatagaattagattttgtttcgaaaagaaaagaaagaaaagaaaaatataattgtgtagataggtttaaaaaaaaaaagagagagagagaaaataatagattaaatgagattgtgtgagaggtttaatgttttgtagattttcgaatgttttaggttttggagaaaaatttttttttgttttttttgtttttttataggttttttttgtttagttcgttgggttggttttttttatttttttaaaatttgaaatgttggggttttttagggtaaagttttgggatttttttttttttttttacgtattttttttaggttattttatttaggtttttatatttgaaatattatttattttttatgggatgtttatatttttatttttaatttagattgtttttttggtattttatcgtaatttttaaagttttgtttattttattgattgatttatttagtagatgtttattgagtatttattgttttttggtgtttatttaatgttttgtagatttagtagttaataagttagataaaaatttttgtttttgtggaattgatatttagggagtgagaataataagaagtaggtaaatatatagtagtaggtagggatgtaataattaaataagataagatttttattttttgtttaaggaatttgtagttattttattgtttaaacgtgtgggaaaagatagagtgttgatagtttttttttatagggaattttatgagtatttatatagtttagaaataaaggaaatattgttaatattattattagggtaataggtggttaaataaagaagttagttagaattttaggtttttttttttttttttttttttttttttgggatagagttttattttgtcgtttaggttggagtgtagtggtacgattttagtttattagagtttttgtttttcgagtttaagcgatttttttgttttagttttttaagtagttgggattataggtattcgttattacgtttggttaatttttgtatttttagtagagacggcgttttattatgttgattaggttggtttcgaatttttgacgttaggtgatttatttgttttaattttttaaagtgttgggattataggcgtgagttattatgtttggttagttttaggttttttggagagtgtttttataggataatatagtaatgattgttttgaagtcgtagaattttaataagatttttttgtttaaagtatatttttaaggatagttttatgttattagagaatagagtatgtttgtaatggatatagatattaatatatattttattgtttataaaataagtgtttttgaagaatttttgttttaatagttgattaaattattatatttgaatttgtagaatttttttgtttttttgagagtagaggaaattaggtattgtttttttattttttttgtgtttttttttgttaattaaaagtaaaataaaaattttaaagtgggttttggagttttattagggtttataaaaaaaaaataaaaaaataaaaaaaaaagaagggttggtgtgatggtttatgtttgtaattttagtattttgggaggttgaggttgggagaaaatattgaagttaggagtttgagattagtttgggtaatataacgagattttatttatatagaaaataaaaatattagttgtgtggtggtgtgtgtttgtagttttagttatttggggacgttaaggtgggaaaattatttgagtttaggagtttgaggttgtaatgagttatgattagattattgtattttagtttaggtgatagtaagattttgtttttttaaaataaaataaataaaaaaataggtttggaagttattgggttagagagtgatagggatgttagataagggtatggggaaggtttttgtgaggaggggtaatatttgttatttattttttcgagggttaggatttttgtttgttttattttttgttttaatgttaagaatcgtatttggtatttagtaggtgtttaataaatgttgaataaatttattaaatatagagtatttattatatgttaggtattgttttaaagattttttaaaagtttaatttttggtcgggtacggtgatttacgtttgtaattttagtattttgggaggttaaggtaggtggataatttgaggttaggagttcgagattagtttggttaatatggtgaaattttgtttttattaaaaatataaaaattagttggatatggtggtatacggttgtaattttagttatttaggaggttgaggtaggagaattggttgaaatcgggaggtagaggttgtagtgagtcgagatcgtgatattgtacgttagtttgggcgacggagtgagattttatttcgataaaataaataaaagtttaattcgtaatttttgtaatatattttatttatgttgtaggtgttgtttgtgagtatattttatagaggggaaataggttttagaaggggggtgttatttgtttgagggttttttgatggaatatggtttagtttatttttttttaattattttagattttggtgttgtttttagttgggtttatggaataatggatagattttattttttttttgaatttttttttaggtttttgttattttttttttttattttttttgtgttgattttttcgattataagttgattatagggaattttttaggaaaggagggtcgaggttaagggagggtggaaggtggagtaattgattcgatgttttttttatttttacgagtaggaatatattgagtatcgtatatttattttattttggtttaatatttttacgaggttgatttcgttattatgttagagattatgtattttttatatagggaaattgaggtttaggggtgttaagtgatttatttaaggttatacggttaggaagttgttgtacgtttttatgttttattttttttgggtgagaatttgttttaggagtttttattgaatattgtgaggttgttgggaggagcgcgaggtgttggggatatagtaataaatagaataagattaagagtaagataggaaatggggaggggagagtagagaaggaggtagaggggatagggtggggttaaagtaggatgtttttttagttttttttgtttttaggtttttttttttttgttgattttagg

SEQ ID NO: 2178 - DNA, 5397 bp, Artificial Sequence
  chemically treated genomic DNA (Homo sapiens)
tttggaattagtagggaaagaggaatttagaggtaggaggaattgggagggtattttgttttgattttattttgttttttttgtttttttttttatttttttttttttattttttgttttatttttggttttgttttgtttgttattatatttttagtatttcgcgttttttttagtaattttatagtgtttaatagaagtttttaggataaatttttatttagaggaaatggagtataggagcgtgtagtaattttttagtcgtgtgattttgggtgagttatttaatatttttgagttttagtttttttatgtggaaaatgtataatttttaatataatgacggggttaatttcgtgggggtgttgaattagggtgaagtgagtgtgcggtgtttagtatgtttttgttcgtgggggtggagggagtatcgagttagttgttttattttttatttttttttaatttcggttttttttttttgagaggttttttgtggttagtttgtggtcggggaggttagtataagggaagtgagaaagggaagtggtaggagtttggggagggatttaggaggggaatggggtttatttattgttttatgggtttagttggggataatattagggtttggggtgattaggagggaataagttgggttatattttattagagaatttttaggtagataatattttttttttggagtttgttttttttttgtaaaatgtgtttatagatagtatttataatataggtagggtgtgttgtaaagattgcgagttaagtttttgtttgttttgtcgagatggagttttatttcgtcgtttaggttggcgtgtagtgttacgatttcggtttattgtaatttttgtttttcgattttaattaatttttttgttttagttttttgagtagttgggattatagtcgtgtattattatgtttagttaatttttgtatttttagtggagatagggttttattatgttggttaggttggtttcgaatttttgattttaggttatttatttgttttggttttttaaagtgttaggattataggcgtgagttatcgtgttcggttaggagttaagtttttggaaagtttttagaatagtgtttggtatatagtaggtgttttgtgtttgataaatttatttaatatttattgagtatttattggatgttagatgcggtttttagtattagagtagagaataggatagataaaaattttggttttcgagaagatggataataaatgttgtttttttttatagaggttttttttatatttttgtttggtatttttgttattttttagtttagtagtttttaaatttgtttttttgtttgttttgttttaaagagatagagttttgttgttatttgggttggagtgtagtggtttgattatagtttattgtagttttaaatttttgggtttaagtgatttttttattttagcgtttttaagtagttgggattataggtatatattattatataattaatgtttttattttttgtatagatggggtttcgttgtgttgtttaggttggttttaaatttttggttttaatatttttttttaattttagttttttaaagtgttgggattataggtatgagttattatattagttttttttttttttttatttttttattttttttttataaattttaatgaaattttagggtttattttaaaatttttattttgtttttaattaataaaaagaagtataagaaagataggaaggtaatgtttaattttttttgtttttagggaggtagaggaattttgtaaatttaaatgtaataatttggttagttgttaaaatagaagttttttaggaatatttgttttatgggtagtaaagtatgtgttaatatttgtatttattatagatatattttgttttttgataatataaggttatttttgaaaatgtgttttgaataaaggagttttattaagattttacgattttaagataattattgttgtgttattttgtgaaaatattttttaagagatttgaaattggttaggtatggtggtttacgtttgtaattttaatattttgggagattgaggtaggtggattatttgacgttaggagttcgagattagtttggttaatatggtgaaacgtcgtttttattaaaaatataaaaattagttaggcgtggtggcggatgtttgtaattttagttatttgggaggttgaggtaggagaatcgtttgaattcgggaggtagaggttttagtgagttgagatcgtgttattgtattttagtttgggcgatagagtgagattttgttttaaaaaaaaaaaaaaaaaaaaagaaagaaatttgaaattttggttggtttttttatttaattatttgttgttttggtaataatattaataatattttttttgtttttaaattgtataaatatttataggattttttgtggaagaggattgttagtattttatttttttttatacgtttaggtaataaaatgattgtagattttttaaataaagagtgagagttttgttttatttaattattatatttttatttgttattatgtatttgtttgttttttgttatttttattttttaaatattagttttataagggtagggatttttgtttggtttgttaattgttgggtttgtagggtattagataggtattaggaaatagtggatgtttaataaatatttgttaaatgaattaattaatgaaataaataaaattttagagattacgataaaatgttagaaggatagtttgagttagaggtaaaaatgtgggtattttatggaggataagtagtattttaagtgtgaagatttggataagatgatttagagaggatgcgtgagaagagagaagggaattttagggttttgttttggggaattttagtattttaagttttagagaagtaggagaagttagtttagcggattgagtaggaggggtttgtggaggaataggaaaaatagaagagggtttttttttagggtttggaatattcgagggtttgtagggtattagattttttatatagttttatttggtttgttattttttttttttttttttttttttttaaatttatttatatagttatgttttttttttttttttttttttttcgagatagggtttggttttgttatttaggttggagtgtagtggcgtgatcgtagattatagttttaattttttgggtttaaattatttttttattttagtttttcgagtaattgggattataggtatacgttatatttggttaattttttaaattatttggagagatagggttttgttatattgtttaggttggttttaaatttaaatttttgggttgaagcgatttttttaatttagtgtttttagtagttgggattataggtatgtattattatatttgggtaattttgttttttgttttggtagcggtagggtttttttatgttgtttaggttggttttaaatttaaaattttggttttaagtagtttttttatattagttttttatgtagttgggattataggtgtataatattacgttatgttaattttttaaatttttagtagtgacggggttttattatgtggtttaggttggttttaagtttttggttttaagtgatttttttattttggttttttaaagtgttgggattataagtatgagttatcgtatttagttcggatttatagtttttattatatttttttaattatatagttttttagatattttgttatttatagttattttttgtgttatggattttagttttattatagttttttaatagttttatatatataattatgtttaatagtttgttttatttagttaatattgttaatagttttttttattagttagttttttatatatacgtgtagttatataattttatgaaacgtttaggtatttatttggtttgttatttttttatatatataaatagttattgatttatagttattattaattagttttttatgaagttttttatatatgtataaaaattattttttttattttttttttatttaagttatttttttatatatttacgatttttgattatagttttttttataaagatatttatacgtatatataattatatagtattttagatattgtcgttatttagttttacgtttttttttaattagtttttagtatttttagtttttgatttatagttttttataaagttttttgtaaagggtttatttatggatatataattcgttttttagttattgttttagttattattgttttttagttagtttttgatatattcggttagtattttataattattattaggttttcgataagttatttatagttatttatgtttttttagtcgtgtatatcgttattttttttatatggttagtttattacggatatacgtgtatagttttataagttttttatatattgttacgtggttatttggtatgttttatttgtttagtttttttgtatggtttttgatttatggttttttatgaattgttttatagattttttggtgttttgatattatttagttgttaagttttttttttatagtttttgatttttagttattgttattgttaagttttttataaatagttttttgttttttttttttgtatgtttagtgatgtggttttttatattatgttagtggtttcgttcggtttatcgttatttttttttttatttttttatagtttttgaatttgtgggatagattgtggtagtaatggtaaatcgatttgtaattagttttaggtgtatatatatatatatatagtttgttatatttttttagttatagttattcgttttttttagtttttgttgtagttttttacgtttgttttcgtatatataattgtatttttttgtatttttggtttcggttattggtttggttttttagttattttttttcgtataattaagttcgtatttatatagttttatagttttagttgatattatagttttaagtaaatagttttgtatattatttattttttaaacgttgagtcgtttatagtgaggtttgttatttatataatttttgttataatttttgataatttttattgtagttttatgtttacgtagttttttatatgtggttttggttatttagtttgttttgttcgttattaaatagtgatagggttgtagttttcgtttttttttcgtagatattattttgtgtatattattataggtttttgtatagtattttgattatttatttaggtttagttattttttgaaatatagttataattttttatatagatatattattaaaagtttgtggttat

SEQ ID NO: 2179 - DNA, 12601 bp, Artificial Sequence
  chemically treated genomic DNA (Homo sapiens)
gtttttaggagattttgagaatatgtgtttaagatggtcgggttataagttggttttataaattttagggagatataaggtattaatgaatatatgtaagatgtatatttatttagtttagaaaggcgggataattggaagtagggaggggggagcggggtttttaggttataggtagatttaaagattttttgattggaaattggtgaaaagagttaagttattgtttaaagatttaatagaaaagtaatttgtgaggattaaggttttattaggtggataaagtttttaggtagtaggttttagagaatagattgtaaatgttttttattagatttaaagagtttgttttattagtaattttaaaagggaggagtatataatgaagtgtgtttggttttttttttttattaacgtttgaattagttttttagattaattttggaatatttttgattgagaggaggggtttatttagatggttgaggggtttataattttatttttggtttatatttttaatgagttgtaaatgagttttttatttattttggatgttagttttttattagatatatgatttgtaaatatttttttttattttgtgggttgtttttttatttttttgatggtataatttggagaataaatgtttttattttgtgtagttaaatggggttttattttttagttatttgtatttgtattgtttgtgttagaatgtgtagaggtagagatataagtaagtaagaggaagagggtagtggtaaaagtaagaggagattcgattgtggagataatgaagtaaagggaaggtgagatttgagtaatggatgtattttttgttttgggagtatttgattttttttttagagtggattttgtttgttgtgaagtttaatttatatgtttgttttattgttagaatttcgtttttatttttttttattgtaggtttgagaagtggttttatagatacgttttttttttttgatatttttattttaaatagttagtttttttgtattttttttgagaaaggtaatgtaaatgtaaaagaagtttttgaggttattttatagaagatgttataatttaatgttttttaaaggtagggattatatttattttttttaaatttttcggtatttaatgtaaaatttagtatatagatttttaagaaatgtttgtttaaagacggatagagggttataggggtaggttttattagtagttgttgaagatgttggaatgtaaggtgttttaggtagtttggattaggaaaaagttttgtgttgaaaataagagaagtaacgaaataatttattatttttattaaataaagatgttgatggttttcgagatagatatgaggattttaggattttggggagtgaaggaattaagtcgttgttatatttgagttgagtatttagggggaggaggaagaggaggagaaaggtaagtaggaggaggcggagtttttttgttagtatttgttagtggaggttgggaagttttttttttttttttttttttttttgtttttatttggtttttttttatgttcgtttattatttttttttttttttttaaggataatttgtaagaaagtagcggcggaggagagttaagattaaaaggtaagaggggttattgagtgaagagtaagggggagagttgggagtgaggtgggaaggtatgggtcgggagtaggcggtagggagaattgaaaggagtagaaaggaaaagaagagatacggtattttaagttggagtcgagagggggatgggtagggtagtcgtgaaggattttagttttttggttagtttttttcgtttgtaggtttagttgtattttttaggaatttgggatgggtgggtggggttcggacgggttgtttttggttgtttgattttattttggtatttatttaatttaaattagtgtttttatgatgttgtttttttgtttttttttgtcgcgtgtttatatacgtacgtgattttagagatatgttttaatatttgtttgtttttgtttacgtgcgtgttattgtgggtttgtaagggatgtttatatatgagtttgtatgaatttttgtgttttgtgtttttataattgttttagagattttaggagaagaatatgagcggtttttataggttagtatttttaaattttttttgttatggcgaatttttttttttattgacgtttttaggggtggaagagttttgtgtgggattttgttttcgttatgagttttaagagtgaatgagaagaaaaaacgggaggaaagggattagtatatttagatgttttgtttttttttttttatttttttgtttttttatttgttttagttatttaatttttttttttggaaaatagtagaaatttggatatgaatattttagttaaataagagcgtttttagttacgcgtgtttttatgttttttttattgtttgttattatatgattttttaagtttaagttaaaagtgtgttttaaagtagaatatggaggtatatttgtatttaagtcgattttatattttttatatatttgtattttatgtagtttattagtttattaacgtttttaataagtatttattggggttttgtaatgtgtatagattttgtaagtttttagtgagttgtgggagagtttttaaaaatgattatgatttttgttttggaggagtttttagtttagttaggaaaaatgattttagtagttatttagtttagtggttggtaaatttcgtttgtaaaagattagatagtaaatattttaaattgtaggtttatgagtttttgttataatatttattttgttgttgtagtataaaaatatttatgataatacgtgaatgaacgaaggtagtgtatatattgaaatttgaatttaatattttttatatgttatgaagtattttttgtaattattaaaaaatataaaaattttttatagtttattgttatataaaaatgtgagaagggttggatttggtttataggttgttgtatgttgatttttgatttagtttaatttttttattagtgcgtacgaaattattaaaatgttatataaagtaggtcgagtatggtggtttatgtttgttattttagtattttgggaggtaaggtgggcggattatttgaagttaggagtttaagattagtttgatcgatatggtgaaaattcgttttaattaaaaatataaaaattagtcgggtgtggtggtgtatgtttgtaattttagttattcgggaggttgaggtaggagaattatttgaatttgggaggtagtgatttagtttagataatatgtggttagaggaagtttaaaagaaggtttttttgatttgtggtaattagtgaaggtttaataagggtataattattattggttttaaatgatggaatgggatgtgaatttgtggaaagggttagggtagttatttggataagggatgtagtgtgtttaggtattaaagtgggaagagtaaagtaatgtttaggtgataatggagtagagaatttataggattaatagttgaagttatatgtaagggttaaattgtagaagtttcgaatgttaatttaataagttgggattttatttgttagtattgattatatgtagtacgtttattaatttttgtttgttaatataatgtatgtttgtgaatgtatgtttttatatatgttttattgtattattttattatttgtgtggatttgggtgtttatgtgatttatgtttttataggtagttattttgagttttttaaatgtagggtagaagtaagtataagttgttcgtaaaatttgggtttttgtgaatgaatatatatttttattgaagtttagggatttatgatttttttatgaaggtttattttgtgtgtttaatagagtgaagaaaggaatataagtatagggaaattagttattgtagtaagtagtttaggtggaaaatggtaatgaggatagaaaggaggggatggataaaggaagataataagaagggagaataataggatttagttattgttttgaatttgagaggaagggaggagataaatttaaaataataggttttagtttgaaaaattgggagagtgataattttattggtattttatggatataaaaatacgtttttttgtgtgtttttttgagagaggtgatttttaaagaataaaatatgaaggtgtttttatgtcgtatgtatatatttgtgtatatacggtagtgattttgtgttaatttttttattttatagtatgtagtaatgtgaggggtaagatttaaagattaaggattaagagatgtttaggaggttgatattttgagagggaagagttatagaaagtttttgattatttttgagattgatattattaatttgtttaattttgatgtgtttttatagttttagattttagttttaattttatattatttaattttattttaatagtataattttataatatttaattttaattttaattataatttaatttatttttgtttttttatttttattttgttgattgttattagtgttttaaattttatttgattttagttttttgtaataatttatttttttattgaaaagggagggatcgttgaggttaatttaattttttttttttttttttttatttttatttagttaattttttttttttttgattttagtttattttttaaataggttttaattggggtgggagggattagggaggaattaggattttagtagttttgggtttgattatatgatattttagtttgttagtttataagggtgtggtttttttttggaagaagtttaaagtttttaggttgtaaagtttagatttggtatagtgggagagtttgattgaggtggttttagttagtttaattgtcgtttttttagttagtggtattttgatttttgttgtgttttaattgattattgttttaaattttagagtggattatgatttatgaagagtattatgtagttaaaattttggggattggtaaagttattgttgttttaatttttggtggagatgtttaaggtaaggaggaggggataaaaaatatggttggtgggatttttggaatttattgatttttttagtttatataatagaattatttttttgtaggtttacgggaattttgggttttgttaaaaatttttgtgaggtttaagtttttaagtgtatttgaattttatttgttatgcgtttatttatttatatttttataaaatttatttttaagtttttttgaagatagggggtttttttggtttttgggaatttaaaagagtggtgtttttttaagtagtattggaaagaaattaaagagataaagttattgagaaggtagtaagtggattaattttatgtattttggtaatggtggggatgggaggagatttagaattagtatatggtgggttttaattaggtttttaggtattaattttgatgtttggagagtttttgtattgattaaggttagttaggtattcggttttttttggtttttttttttttttttttttattattttttgaataaataggaatagtagtagttaattaatatagattcggtatgaggtggaggggtagaaaatagagttagtaaaaatttttttttaggttgaatttaagaaatttgggagttacgaaaattaggtatataggaaatacggagtgggagtaagagggtattgatttttttaaaaaaaatttttttttttttgattttttgatatattttgatatattgaaaagaggtagaatttttttgaaaaggatatatgatatggagataattagaaagagagaaggaaagcgattttagttaggttttttttttttgtattattgtttttaggtttttttagattttgcgttaaggatttattttgtatagagttttgttttgtatgttttgaagaagttgaatttttttaggaatttatagtttaatgaggaaattagaatttttatataaggtatataaataaaaataagtaagtgtgtattaattaagtggaatttatttatataatgaaatgatagtttttgattgaattaattagtgaaaattttatggagaaggtagattttaagatattgaattttttatttaagtaaggtgtttagaatagtagtaggtatatcgtaaatatttaatatatgtgattattaattaaaaatgaattagtgagtatttattgtgttaattaggatgatgatgaggtttattagtgatatattagtgaaaaagtttgacgtaatttttgtttttatgatatttattagtatattagtaaagttagattttttaaattaatatttattataattgtgatataggttatgaattagaaagtgttagaatgaagaaattgaggaaggagggtacggaggtttgagtttaggaatagtgattagattaggaatgtagagttttagttgagtttgtagaaattatagatttggtttttattgtatttgttttttttgttggtagagtattatgttaatattgaattttttaatatgtatttgagtattgattttgaaattttggtagaatgatttgtggatttagattgttagattaggggaagaaagaagaaagtttgttaaataaattaagtgagatgtatagagttataaaatgaagaagagttttttagagagggaaagagagaaagaaaggttagattaggatttaatttgggttttagagtagtagagtttttttattttttgattttgagtagtgagatttttttattttagtgaagattataatttattgttgtaagaaaaagattttgttttatggaggtagggattatagataagttgatttttgaaggatttagttgataggtatagtgtagttagggaaatagtttatttgtaaatttttataatattatagttatatgttattagggattgagagtgatagaaattgaaattttatggaggtaaggaggtaaaatagaaaatttaaaatagagttgagaggttttagttgaaggagaagtttaaatttagaagtcgtttgtttagagttgagtttgatggattttagttttttcggggagaaaatatagaaatgttttgttttgtttttttttttttagggtttgtgggttatatgggaaagtgagattgagttgtgtaaaatttatagaggttatagttttgttattttttaaatttagtaaagttaattattttttgaggtagaaaaatggttaggaattagatattttgagtttaaaaataaagaattttgggatgttgggttgatgtcgtattaaattttaattttttttttagtttaggaatggttttagtcgttaaaattatgttatttttagttttatgatatcggtatattttatttttggaaaggattttagttagttatttgttttggttttttgtttttagatagttagttattataaatgtatgtttatttttttgatttttttttttaagagatgggacgggatcggttaggtgtagtggtttatatttgtaattttaggattttgggaggtcgaggcgggtagattattcgaggttgggagttcgagattagtttgattaatatggagaaatttcgtttttattaaaaatataaaattagttgggcgtggtggtgtatgtttgtaattttagttatttgggaggttgaggtaggagaatcgtttgaattcgggaggtagaggttgcggtgagtcgagattatattattgtattttagtttgggtaataagagtgaaattttgttttaaaaaaaaaaaaaaaaaaagatgggaagggatttttttatgttgtttaggttggttttgaatttttggtttaagtaatttttttgttttagttttttaagtagttgagattataggttatgtgttattatatttggttttttttatttttaaaggttcgtacgaatagagatttttttatttttttggtttgttattttaaggtttataatttttatttatgatatttattaggaagtgtaatttatttttaataaatgtttattttttatatatttttaaaaattttatgaaagttaaggtagaaataaattatttagtattagttttaaagttatgtttaagttatttattagattttttttttgtttagttttatagagatttattatttatagtttttttttttaaaatttttttttaatatgtcgtaattggagattttaaattacgtgtttatgatgttttttagaattttttttgattatatttagaatatttattggatggtgtttgtaattttatttttcgttttgtttttaataagttagataattgttatggagggttatttagggtaatatggaatagttaaggagattttggttaggattggtttggggttagattaagttagttaggttggttaggagagtttaaagaattatcggggttttttaatataaattatttgtatattttaaagtttgtgatttttagggaattaggggtttgaggtataggtattaggtatatgaagagtattttaaagtttggtttttaggaaaatatttagatatttaagttggagataggatgaatgatttttggaagttggtagagttgaggtaagaagaaggtagagggagaagagaatttttttattgtgagattttttttgtatgtttaatagatttggatagtttttgtttattatttgttgtttgtttttgtattgaaaacgttcggagttatttgttttttttaattttgggtatattaataggattgtattaagttagagtttttataggattatttatttagtttgggaataggaaataatgttttaatttatatattttagaataatttttttttttattttttgaaattataaatttatattttagaattttaggtatttagaagagaattttataggttttgtgaaagattggaaaataaattttagttttatatttattttgattttattgagttaattttatttattttttttaaagtattgaaggttttgtgttgatttttgattttgttttttttatatatataggttattttttaagttattgagaagtttttttttttatagattttttggttttgatgtttttaatttaaggttgtgaatttaggtttttagattttatggggttttgttttagtgatgttataagtaagttttgatattagtgtttattaatggttttttgttgataagtttaaatttttaggttttattttagattagttattagaagtatttggtattgttttaattttttgaaattgtttatttttggtttttaagatattgttaaattttggtttttttgtattttttgttgttttttattagtttttattatggaatttttttttttttttttgtttttttaatgttggttttttttagggttgtattttttgttttttttttttataattttgtatatttttttgagatagttttttttgtgtttatatggatattttataagaattttaaatagtatatttaaatatgaatgtattatttttattgttatttgtttaaattaaaatttgtttttgttgagttagtggattacgtttttattttttgtttaaattaattacgggatattttttttttttttgatttttgaaatgtaattatattgttaattggatataagttttgttgtttttgttttttagatgttttttgtttagtattttgttttgttttaaatgttatttttttagtttaggttttttatattttttttttaggatgttaggtagttttttaattttagaaattttttttttaagttgttttttatattgttgttagagttatttttttgagatatagatcgtattatgtttttttgttttttaaattttttagggattttttgttgtatgtaatttttttttttggaggggttatagatttttttaagaattaaatgaaagttgtggattttttttcgaaagaaatgtttatgtttgtagaattttttatatagttttgtggggtttttggattttttgaaatttattatttatggatttttgattaaattttggtttgtagaagataagttaaattttttatggtatataggtgtttgtttatttgtagagttttattttttattattttttagtttatattttattttttataatattaaattatttaaggttattttttgatttttatttttatttgtgttattttttttgttaagaatatttttttttaaattatttatttgatagaaaaattttaaaggaaattgttttttaggttttatgataaatgttgttttttttgtataattttttttgatttttttttggtaggtttagatattttttgtttttgtttcgattgtattttgtttttttttttttttttttttttttttcgagagatggggttttattgtgttgtttagattatatttaatttttgggtttaagtgatttttttgttttagttttttaagtagttgggattatagggatgtattattgtatttggtttatgttttttatagggattaatagattatattgtaattttttatatgttttgaagattattattaagttttttattttggtatttttagattttgtggtggttattgttgtatttttagtgtttagtatagtgtttgaaatatgataggtgtttagttagtatttgtttagtgaataaatggatttttaatttaatttggagttaatagttatgtaatattaatttgtaaaaaaaagaaatattttgattttttttattttattttatttttgatagttttggattatttaaaagtttgtgatggttttttagtttggtgttgtagattttttcgattattagtttttttagtgtttgttggtatattatatttttttaggtagggttaaggataatatgaatagattttagattaaaataaaaatatgtattagaatgtttaagagagattggttaaaatggtttataagaagttgattttttatggtttttaagattttttgtgtattattatgtgttttttgttatattatatggtaggaaaggaatgttttttattttttattaataaggttatgtttagtagaggattagtgtattgtttttaatatgaaatatatatatgggatatttgttgtgtgttttatgttgggacgggttggtttttttatagtgtttttggaagagagttttttttattgagtagttattaggagagggataatattatttgtgaaaaagggaaaaggattgtttttttattttagttttaagtttttgttttgttttgttttaattttttttttttttttttttttttttttttttttttttttttatagatggagttttgttatgttgtttaggttggttttaaatttttaggtttaagtagtttttttagtttgattttttaaagtattgagattataggtatgagttatcgtgtttagttttagttttaagttttttttttagtagaagtagagagagaatgatttatagtatattttttgagttttttataaatattttatatatagggttataggaagagattagtaaatatttgttgattaattgaggaaatgttaggagaacgtagtgagagaatagagtttttattaattttttttgtatatttggttatagttttttttggtagtgtgataattagtaaattataattgtgtggtatatattggaatatagattaatttaagtgatataaaaaaggggggtgtgtgtgtgtagattgagagaattagttgtttggtaatagatatattgtgaatttgtgaataaattgtgatttgttaggttattgaattatatagagttatgtttttgttttgaaatgttaattaaaagttgatgtttcgatttagtgtagaaagtaaggaaaaatttagtatagttattgatattagtaggataagttatagaggttaataatgttaatttaggtatttgagaatttgaattttaatttgaattttttaaaagtattagttttgtgttttttgatttttttgagttttagtttttaaatttttaaaatggagataattttaggattgttaatagtattaaataagatgatgtttgataagtttttggtagtgtttagtttataatatatatttaagaaaatgtgttatttttgttgttattgttttttagatggttttattaaggaaaggttttgggaaaggtaggattttgggggggtttgaggagtaatgaatgtagattatttgaagttttagtaatattgattgtagtaattgggagtggggaggttagaagattttgatgagaggattattttagatttagagaaaagattaaataaagtattgattcgttatttttagttaaatgtaatatttttggattttagggcgtttttttttaggagtaattttttcgtgattttttttgtttttttttttagg

SEQ ID NO: 2180 - DNA, 12601 bp, Artificial Sequence
  chemically treated genomic DNA (Homo sapiens)
tttgaaaggagggataaaagaagttacggagaggttgtttttaagaaaaggcgttttggaatttagagatattatatttggttaaagataacgaattagtattttatttagttttttttttgaatttagaataatttttttattaaagttttttggtttttttatttttaattattgtagttaatgttattggagttttagataatttgtatttattgttttttaagtttttttaaaattttgttttttttaagatttttttttgataggattatttgggaaataataataataagaataatatatttttttgaatgtgtattgtgggttagatattgttaagagtttgttaaatattattttatttaatgttgttaataattttggaattgtttttattttaaagatttggaaattgaaatttaaaaaggttaaggggtataaagttagtatttttagaaagtttagattagaatttaagtttttagatgtttaagttaatattattagtttttatggtttgttttattaatgttaatggttgtattaggtttttttttgttttttgtattgaatcgagatattagtttttagttggtattttaggataaagatatgattttatatggtttagtaatttggtaagttatagtttatttataagtttatagtatatttgttattagatagttgatttttttagtttatatatatatattttttttttttgtgttatttgagttggtttatgttttaatgtgtgttatatagttgtgatttattagttattatattgttagaagaggttgtgattaagtgtgtaggaagaattggtggggattttatttttttattgcgtttttttggtatttttttaattagttaataaatatttgttagtttttttttgtggttttgtatataagatgtttatggggaatttaaaaagtatattgtaaattattttttttttgtttttattggaagaaaaatttagaattagggttggatacggtagtttatgtttgtaattttagtattttgggaggttaagttgggaagattgtttgagtttaggagtttgagattagtttgggtaatatagtaagattttatttgtaaaaaaaaaaaaaaaaaaaaaaaaaaaaaaaaagaaagaaaattaaaataaaatagaataaaaatttaggattaaaatagagaggtaattttttttttttttttatagatgatattattttttttttagtagttgtttagtgaaaagaatttttttttaggagtattgtgaaaaagttaattcgttttaatataaaatatatagtaggtgttttatatgtgtgttttatattaggaataatgtattgattttttgttaagtatggttttattggtgagagatgggagatattttttttttattatgtaatgtgataaggagtatatggtgatgtatagggaattttaagagttatgaagggttaattttttgtaaattattttagttagttttttttagatattttagtatatatttttgttttaatttaaaatttgtttatgttgtttttaattttgtttggagaaatgtaatatattaataagtattaagagagttagtaatcggaaaaatttgtagtattaaattaaaaaattattataaatttttgaataatttaaggttattaggaatagaatggaataaaaaaaattaaaatgttttttttttttgtaggttggtattatatggttattagttttaaattgaattgaaggtttatttgtttattgaataaatattaattgaatatttattatgttttaggtattatgttaggtattgggggtatagtaatgattattatagagtttgggaatattaagataaaggatttggtaatggtttttaagatatgtggagaattataatatggtttattggtttttataaaagatatgagttaagtataatggtgtatttttatagttttagttatttgggaggttgagataggaggattatttgagtttaggagttaagtgtagtttgggtaatatagtgagattttatttttcgaaaaaaagagagagagagagagagagataaagtatagtcgaaatagggataaagagtatttaagtttgttagaaggaagttagagaaggttatatagaaaagatagtatttgttatgggatttaaaggataattttttttaaaatttttttgttaggtggataatttgagggagagtatttttggtagagggaatagtataaataaaggtgagggttaaaaaataattttaagtaatttagtattataaagaataaaatataaattaggaaatggtgagagatgaagttttataggtgggtaggtatttatgtgttatgagaagtttgatttgttttttataggttagggtttaattagggatttatgggtgatgggttttagggaatttaggaattttataaaattgtatgaaaagttttgtaggtatggatatttttttcgggagaaggtttatagtttttatttgatttttaaaggggtttgtggtttttttaaaaagaaaagttgtatataataaagaatttttgaagaatttagagagtagagggatatgatgcgatttgtattttagaaagataattttggtagtagtgtgaaagatagtttgagagagggatttttagggttaggaggttatttggtattttagaaaagaaatgtggaaggtttgaattggaagagtagtatttgggataaaataaaatattggatagaagatatttaggaaatagaagtaataggatttatatttagttggtaatgtgattatattttaagggttagagaaggagaaaatgtttcgtgattgatttagataaagggtaaaagcgtggtttattgatttagtagaggtaggttttggtttgggtaggtggtagtgggggtgatatatttatatttggatatgttgtttgaagtttttgtggagtatttatgtgaatatagaagagattattttaagagaatatgtagaattataagggaaaggggtaaggaatgtaattttgaggaaaattaatattgaaggaataggaaggggaaggggggttttatgataaaaattaataaggggtagtaagaaatataaaagaattaggatttagtaatgttttagaagttaaaagtggatagttttaagaagttggaatagtgttaaatgtttttgataattgatttaaggtaaggtttgaaagtttgggtttgttaataagaagttattggtgagtattgatgttaaagtttatttatgatattattaaggtaaagttttatgaagtttagaagtttaagtttataattttaagttgaaggtattaaaattaaaaaatttgtgaagagaggggttttttagtagtttgaggaatagtttatgtgtgtgaaaggaataaggttaaaagttaatataaagtttttaatgttttaggaaagatgaataaagttagtttaataagattagaatagatatgaaattaaagtttgttttttagttttttataaggtttatgggatttttttttggatatttggagttttggagtatgaatttgtaattttaggaaataagggaaaaaattgttttgaaatgtataggttggaatattgttttttgtttttaagttgagtaaatggttttgtaaaaattttaatttaatgtaattttgttggtatatttagggttaagagagataagtgatttcgaacgtttttagtataaaagtaaataatagatggtgggtagggattatttaaatttgttgggtatataaaaaaaattttataataaggaaatttttttttttttttgttttttttttattttaattttattaatttttagaagttatttattttgtttttaatttgaatatttgagtgtttttttagaaattaaattttaggatgttttttatgtatttggtatttatgttttaaatttttagttttttaaaaattataaattttggggtatataaatagtttatattaaggagtttcggtaattttttgagtttttttagttaatttgattagtttagtttggttttaagttagttttggttagagtttttttggttgttttatgttgttttaaataattttttatggtagttgtttgatttattagaagtaagacgaaggataagattataggtattatttagtaggtattttgggtgtagttaggaggggttttggagaatattataagtacgtagtttggagtttttaattacggtatattgggaagaggttttagaaagaagaattgtgggtaatgggtttttatgagattagatagaaaaaaaatttaataaatgatttgagtatgattttaaagttgatattaaataatttatttttgttttaatttttataagatttttaaaaatatatgaggaataaatatttgttagagatgaattgtattttttaatggatattataagtaaaaattataaattttagaatagtaagttagagaggtaaaaggatttttgttcgtgcgaatttttaaaaatagaaaaggttaggtgtggtggtatatggtttgtggttttagttatttgagaggttgaggtaagaggattgtttgagttaggagtttaagattagtttgggtaatataaaaagatttttttttatttttttttttttttttttttgagatagagttttatttttgttgtttaggttggagtgtaatggtgtgatttcgatttatcgtaatttttgtttttcgggtttaagcgatttttttgttttagttttttaagtggttgggattataggtatgtattattacgtttagttaattttgtatttttagtagagacggggtttttttatgttggttaggttggtttcgaatttttaatttcgggtgatttgttcgtttcggttttttaaagttttgggattataggtgtgagttattgtatttggtcgatttcgttttattttttaaaaaaaaaaattaaaaagataaatatatatttgtaatggttggttatttggagatagagggttagagtagatgattgattgaggttttttttaggggtagaatatgtcgatgttataaggttaaaggtagtatagttttggcggttgaagttatttttaggttggaaagggaattaggatttggtacggtattagtttagtattttagagttttttgtttttgagtttaggatgtttgatttttggttatttttttattttaagagatgattagttttgttgaatttggagaatgataaagttgtgatttttatggattttatatagtttaattttatttttttatgtggtttataagttttaagggaaaaaaaataaaataaaatatttttatgtttttttttcgggagaattagagtttattaaatttagttttgggtaggcgatttttgaatttgagttttttttttagttaggattttttagttttattttgagttttttgttttgtttttttgtttttatagaattttagtttttattatttttaatttttagtgatatgtggttgtgatgttatggggatttgtaggtgggttatttttttggttatattgtgtttattagttgggttttttagaaattagtttatttatagtttttgtttttataaaatagggttttttttttatagtagtgagttatggtttttattagaataagagggttttattgtttaggattagaaggtggaagggttttgttgttttgagatttaagttaaattttagtttgatttttttttttttttttttttttttaaaaagtttttttttattttataattttgtgtattttatttggtttgtttagtaggtttttttttttttttttttaatttgataatttgggtttatagattattttattaaggttttaggattaatgtttaagtatatgttaaagaatttagtattggtatggtattttgttagtagagaagatagatgtaataaaagttagatttgtggtttttgtaaatttaattagggttttgtatttttaatttggttattatttttaaatttagattttcgtattttttttttttagtttttttattttagtattttttgatttataatttatattataattataataaatattagtttaaaaagtttagttttattaatatattaataagtattataagaataaagattgcgttagatttttttattgatgtattattggtgaattttattattattttgattgatatagtagatatttattaatttatttttaattaatgattatatgtattgagtatttacgatgtgtttgttattgttttaagtattttatttaaataaagagtttagtgttttgaaatttattttttttatgaagtttttattgattaatttaattagaggttattattttattatgtaagtagattttatttggttaatgtatatttgtttatttttatttatgtgttttatgtaagaattttagtttttttattaaattataaatttttaaaggaatttaatttttttaaaatatataagatagggttttatataaagtgggtttttagcgtaaagtttaaaaaagtttaggaatagtggtgtagaggaggggagtttagttgaaatcgttttttttttttttttttaattgtttttatgttatgtattttttttaaagaaattttatttttttttaatgtattagaatatattagaagattaaaggagaaaaagttttttttaaaaaaattaatatttttttatttttatttcgtgttttttatatatttaattttcgtgatttttaggttttttaaatttaatttagaaaagggtttttgttggttttgttttttgtttttttattttatatcggatttgtattgattaattgttgttgtttttatttgtttaaggggtgatgaaagggaagaggaggaaaggttagagaaaatcgagtgtttgattgattttggttagtgtaggaattttttagatattagagttaatatttgaagatttagttgggatttattatatattaattttgggtttttttttatttttattattattaaagtatatgaagttaatttatttattgtttttttaataattttatttttttagtttttttttaatgttgtttgagaaaatattatttttttaggtttttaaagattaaaagagttttttgtttttaaagaaatttggaaataagttttatgaagatgtgggtaaataaacgtatggtaaataaaatttaaatgtatttgaggatttaggttttatagaaatttttagtaaagtttaaaattttcgtgaatttatagaagaataattttattgtataggttaagggagttagtaaattttaaaagttttattagttatgttttttgtttttttttttttattttgggtatttttattagaggttaagatagtaatggttttgttaatttttagggttttggttgtatggtgttttttatgggttatgatttattttagaatttaagataatggttagttaagatatagtaggaattaagatgttattagttaaaggaacggtaattagattggttagagttattttagttaggtttttttattatattaagtttgagttttgtagtttgagagttttggattttttttagaggaaagttatatttttgtagattgataagttgaaatgttatgtaattaagtttaagattattaaggttttaatttttttttgattttttttattttaattggaatttatttggggaataaattaaggttagggaaaagagaagttgattgaatagaaatgagaaagggaggagaaaaagttgagttagttttaacgatttttttttttttaatgaagggataggttattgtagagggttggaattagatgaggtttagggtattgatgataattagtaaagtagaagtagaagagtaagggtaggttggattataattaagattagggttgggtgttatggaattgtgttattggaatggggttaggtgatatggagttgaaattggagtttgaggttataaaggtatattagagttaggtaaattaatggtgttagttttaagaatggttaggggttttttatggttttttttttttaggatgttagttttttgagtattttttgatttttggtttttgggttttgttttttatattattatatgttatgaaatgagaaaattaatataaagttattgtcgtatatatatagatgtgtatatacgatatgggaatatttttatattttattttttagggattattttttttaaaggaatatataagaggacgtatttttgtatttataaaatgttagtagaattattatttttttagttttttaggttaaaatttgttattttaaatttatttttttttttttttttagatttaaaatagtaattaaattttattattttttttttttattatttttttttatttatttttttttttttatttttattgttattttttatttgaattgtttattataatagttggtttttttgtgtttgtgtttttttttttattttattagatatataaaataaatttttataggaaggttataggtttttaggttttagtggagatgtgtatttatttataggaatttaagttttacgggtagtttgtgtttgtttttattttgtatttggagaatttagggtagttgtttatagagatataagttatataaatatttaaatttatataaataataaaataatgtaatgagatatatatgaagatatatatttataaatatgtattgtgttaatagatagagattaatgaacgtattatatataattagtattaataaataaggttttaatttgttgggttggtattcgaagtttttataatttagtttttgtatatagttttaattgttggttttatagattttttgttttattgttatttgaatattattttgttttttttattttagtgtttgggtatattgtattttttgtttaggtggttattttggttttttttatagatttatattttattttattatttaagattagtgatagttgtatttttattaaatttttattgattattataggttaaggaaatttttttttggattttttttaattatatgttgtttaaattggattattgttttttaggtttaagtgatttttttgttttagtttttcgagtagttgggattatagatatgtattattatattcggttaatttttgtatttttaattgagacgggtttttattatgtcggttaagttggttttgaatttttgattttaggtgattcgtttattttgttttttaaagtgttgggataataggtataaattattatgttcggtttgttttatgtggtattttaatagtttcgtacgtattgataagagggttggattagattaggggttagtatataatagtttgtaggttaaatttagttttttttatatttttgtatggtagtaagttgtgaaaggtttttatattttttagtggttgtaaaaagtattttatgatatgtgaaaaatgttaagtttaaattttagtatgtgtattattttcgtttatttacgtattattatggatgtttttgtgttataatagtagaatggatattgtgatagagatttataagtttgtagtttaaaatatttattatttggttttttatagacgaagtttgttaattattggattggatggttgttaaagttattttttttaattagattgagaatttttttagggtagggattatgattatttttaaaaatttttttatagtttattaaagatttgtaaagtttatgtatattataggattttaataaatatttgttgaaaacgttaatgaattgatgaattatatgaaatataaatatatgaaaaatgtaaaatcggtttagatatagatatatttttatattttattttaaaatatatttttaatttggatttgagaaattatatagtgataaatagtgaaaggaatatagagatacgcgtgattagagacgtttttatttaattggaatgtttatgtttaaatttttgttgttttttaaaaagaaagattaagtgattagggtaaataggaaggtaaaaaggtggaaaggaaaaaataagatatttgggtatgttgattttttttttttcgttttttttttttatttatttttggagtttatgacgggggtagaattttatatagagtttttttatttttggaagcgttagtgagggagaaaattcgttataataagaggagtttaagagtgttgatttgtaaaaatcgtttatattttttttttgaaatttttaagatagttatagaggtataggatatagaaatttatgtagatttatgtataagtattttttatagatttataatgatacgtacgtagataaaaatagatagatattaaaatatatttttaaaattacgtgcgtatataagtacgcggtagggaggaatagaaaagtagtattataggagtattgatttgaattgggtgagtgttagggtagggttaggtagttaagggtaattcgttcgagttttatttatttattttagatttttggggaatgtagttgagtttgtaagcggaggggattggttaaggggttaggattttttacgattgttttgtttatttttttttcggttttagtttaggatgtcgtattttttttttttttttttgttttttttagttttttttatcgtttgttttcggtttatatttttttattttatttttagtttttttttttgttttttatttaatggttttttttgttttttagttttagttttttttcgtcgttgtttttttgtagattgtttttgggaaaggggggaggggtgatggacgaatatggggaggagttaggtggaggtaaagagggagggggaaggaggagaggttttttaatttttattaatagatgttgataagaaggtttcgtttttttttgtttgttttttttttttttttttttttttttttaagtatttagtttagatatggtagcggtttagtttttttattttttagagttttggggtttttatatttatttcgagagttattagtatttttatttaatgggaataataaattatttcgttgttttttttgtttttaatatagaatttttttttagtttagattgtttgagatattttgtattttaatatttttagtaattgttaataaaatttgtttttgtggttttttattcgtttttaagtaaatattttttgggagtttgtgtgttagattttgtattaggtgtcgagaggtttaaaaaaaataaatatagtttttgtttttgaggaatattgaattatgatattttttatagaatagttttaaaaattttttttatatttatattattttttttagagaaagtatagaaaagttagttatttggaatgaaagtgttaagagggaagggcgtgtttgtgaggttattttttaagtttgtagtggggagggatgggggcgggattttggtagtgaagtaaatatataaattgggttttatagtaaataggatttattttggaaaaagggttagatgtttttagagtaagaggtgtatttattatttaagttttattttttttttgttttattgtttttatagtcgggtttttttttgtttttattattgtttttttttttttgtttatttgtatttttatttttgtatattttggtataaataatataaatgtaagtgattaggagataaaattttatttgattatataaaataaaagtatttgttttttaaattatattattaagaaagtggaaagataatttatagaatgggagaaaatatttgtaaattatgtatttgataaggggttggtatttagaataaataaagaatttatttgtaatttattaagaatgtaaattaaaaataaaattataagttttttaattatttgaatagatttttttttttagttaagggtattttaaagttaatttgaaaaattagtttagacgttgatggaaaggggaagttagatatattttattatatgttttttttttttggaattattgatagaatagattttttaagtttgataagaaatatttataatttattttttgaaatttgttatttggaagttttgtttatttgataaaattttggtttttatagattgtttttttattaagtttttggataataatttaattttttttattaatttttaattagaaaatttttgaatttatttatgatttggaagtttcgtttttttttttttgtttttagttatttcgtttttttggattaaatgaatgtatattttatatatatttattgatattttatatttttttaaaatttataaaattaatttgtggttcgattattttgaatatatgtttttaggattttttgagggt

SEQ ID NO: 2181 - DNA, 6615 bp, Artificial Sequence
  chemically treated genomic DNA (Homo sapiens)
ttttttatgcggaaggtttagtttttgaggattgatttaatttaaaatatattaattaaggtttattatgttttagatattgagtaaggtgtggaggttataagggtaaataagagatatagtatttgtttttttagattttattattttttaggtaagatagataagtaattgggtaattgtgatattgaaggttaggtgttatgatggaggggaatttaaggtattgtgggaatttgtattagggatgttttatttagtgttggttgttagggaagttatggaattttgtttagaataagtgtataaagagaagaagagtttaggatggaggttggggtgggtttataggaaatcgtagtttaggaggtagggtaagaaggtagaggttaattaagtatttgtttgttagtagttttgagtagttgttggttataatgtaggtttagtttataaagtgaaaaggtttttggtttagagttgtttattgtttttttttttattagttatgaaggggaagataatttttggatgttatattttttagttatttaagttcgggatttaggaataaggttagaagtagagggtgtttatttaggattatttgagatatttttttagaggtaggtgttgaattgtcgttaagagaggataagttattattggggaaaagtttatagggttaagataataaagaggttagaaaatgggaaaatggttagaaaatggggaagtgagttaggaagttgaaagtttataagttgggatgggttggggtaggtgttttaggttaatacgatgattaataatatgggaaattgtgtttgtaggatgttttgggggttaggggttggtttgtagattggaagttatgattgtttagggtttattgtattgttatggtttagtgtttttatatttaattttttatgtttatttgtatttgttcgatttttcgtataagagttagtttttgaaattagggttttttttttttatatattaattattttaagtttgttaagtatttattttgttttagtatggggaagatttagaaacggtttaagatattagtttttatttttaacgtttttgtagtaaggttgggagttagcgtttaggtttattggaaagatttttggagaaagatttcggtttgatttttattattgtttttttttaagtagttaaacgattattggaaaattatataaattttttgggtttttatttttttatttttaaaatggaaataattaaaatttattattataatgtgattagaatttaatgagttaaggtggttagagtattaagtatattgtttggtatataatagatgtttaataaatattatttttttttttgaaataatagtaagagattgtggtgataaatagttaagtgttgagttgtgggtattgattgttattttttaagtatttgggtttattttaagggttttagtgatagttgaggattgagagtttgtattgtgatggtgagaattagtgtttgtgtgtatttatgtaaatcgttttattttttttttttattgttataggtagaagtataagattttttattttttattttatgtttatgttataggattttgttttgtaattgtagtttgttttttgtttgtttgttttggtttgtttttttgagatggagttttattttgtcgtttagattggagtgtagtggtacgatttcggtttattgaaatttttgttttttgagtttaagtgatttttttgttttagtttttcgagtagttaggattataggtgttttttattacgtttagttaatttttgtattttaagtagagacggggttttattatgtttgttaggcgggtttcgaatttttaattttaggtgatttgttttttttggttttttaaagtgttgggattataggcgtgagttattgtatttggtttaattgtagtatttttatttttttaatataagttaaaaattaaattagaaatcgtgattaattgttattattttttgtattaaaggtgtttttttagttttcgtataattttatgaggtaagtattgttattatttttatttttatagatggaggaagttggggttttgaaagtaaaggaagttgtttgaggcgatgtggttggttaatagtggggttagtgtataaaggagtatagtttgggtaagatggtaagattttgtttttatttttaaaaaaaaaaagtttttaaattaattgggtatggtagtatatatttgtagatttagttattttggaggttgaggcgggaggattttttgagtttaggaattggaggttgtagtgagttatagttagtgttatattagtgtattgtagtttgggagagagagtaagatttcgtttttaaaaattaaaattaaaattataaaaatttaaaaaaaaaataagggagtagaattattagtatagttgttttggattggatgtgagtaagaataaattttgatttaatttatggaaatgttagagtttttttggtttttgtcgttgagtttattttaggttaatttattttatagtttaggaagttgggtttagaagggtatggtttttaatttagtgatgaaggattgaggtgtatttgtgggaattatagatttcgtttaaggtgttgagtttatttaggaaagagaatttcggtatttttagttatcggtatttttttattttatgaatgtaaatttagagagattttttatattatatttttagtatttagagtagtttttggagtatagtagggtttaggtaatatatgttaaatgaaaaaataaattaatgaatataggttgggcgcggtggtttatatttgtaattttagtattttgggagattgaggtgggtggattatttgagattaggagttttcgattagtttggttaatatgataaaaatttgtttttattaaaaatataaaaattagttaggtatggtggtgtatatttgtaattttagttatttgggaggttgaggtataagaatcgtttgaatttatgaggtagatgttgtagtgagtcgagattgcgttattgtttattagtttaggcgatagagtaagattttgttttagaaaaaaaaaaaaaaaatataaatttatatataatagatatattttatgtataagtgttagaaatatttagttatagataagtatatataatgaagatatttaagtatacgcgtatatatttgtgtataatatatatttgtgtttatatatataaatttatatttaaattaaagatatatataaatacgtgtatgtatataaagatgttatgggtaatatatataatatatatatgtataaatatatatttatttatttttatatatatgtatagtgattttttataatgattttgggtttaggaagtagtttgtttattttacgaattttagtttgtttgaagttcgttaggatgttttttgtagatttcgtttagttagttggtgattggttttcgttttttgaatttttaggtttagggtcggttaggtaggtaggttgtatttttggtagtttttcgtgggtgggtaggtaggtaggtagtggacgtagaggttattggggtgagagttggggttgttttggtttttttgtttttggttggaatgtgagttgtaggggttattttttaggtttcgttttttttttatagttatttattagttttaggtttagttaattcgtgatttttagttttgttaggtttttgtagtttgggagttggatatagaaggtagtgagaggagtggtggtaaagaaagatttagaattaagggagggtatatataaacgtagagagagaggtatagtttttatttatagagatagatatatatacgtagagataggtaggcgtgtagatttatagttttatcgaaagatatatatttagatatttttaaatatatttagatatatagcggatacgaatagattatataagtatatagagatatagagagatttgatttttatatagaggcgtatttggaggtatagtagttatacgtatttagattatatagaggtttagatgtatcgtttatggatatttatagattcgtaaatgtttatgtatacgcgtagatgtatatagattttcgcgtagcgtatagttttttttcggttagggattaggaggagatgtttgagtgagattattttttattatagggggttgtttcgtagggagggtttgggaagattgttttttaaggaggtaataggtttgattttttagttaggtgttttgagaggttttttgtgggaggtttattgtgttcgtgtttggttaggagggtggtaggtcgggttagagttttggagttacgtaggtttgggttttgtttttgttagtttttcggatatatagatgcgcgtatatatataatatatatatattttttaagaatgtttatgtttattcgatatatgtaggtaggggtgttttcggagtttcggtttttttatttatataatttggttaggaattttttggttttttaggggtgtgggtatggttgtttttttaggtatttcggacggttttttttgtagaggcggttagattatgagttttgacggttgacgttggatttttggatgtttttattttaggtgatcgttttgagagtcgaagtagggttgtgggttttgtgggcgggcgcggcgcggttcggggagttgcgggttgggttcggcgaggcgtttggatttgtcgagagtttttcgtacgtattgcgggtttcggcgttgcgggttggtcgggcgttgcgggttgatcgggcgtttcgggaattcggttcgggaatttcgtttgcggtgggcggggtcggttcggagtttcgtttcggtttagtttttgaaatttaggcgcggatcggttgtagttttagaagggagttgttgtttgcggaggaaattgtatcgacggacggtcgtttagttacgggaggatttggagtggtattgggcgttcgacggattattttcgggattcgtttgtttttcggcgtttcgtttcgtcgggtcgtttttcgtcgggttttttagttatagttttatttacgggtttttgatttcgtaaggtttttagaagatgttcgaattatcggtcggggtttcggggtagtagtgagggaggcgtttagttttttatttagtttttttttttttgtgttaggggtttttcgggggatgagtatggtggttttttttcggagttttttggttcgggacgtttgagaagatgtcggttatgaggttgtttttttgttttttgtagtttttggtcgggttggcgttgtttgttgtgtttttttaggtaagagttatttttatttagtttggttttttagatttttttattttagtattggaagtatgggattttgaaattatagatttattttagggagtagtaattttaaggatgtttatatattttttaaaggttaggttggatttttttcgtttgggaagagattttaggttggttgttttttaggttttgggggttgttttggtgggggtagggaagttatagggagggagggagggagggaggttttttgtttggtttttggagttttggtggttttgttaaaagtatttgtttattaattttaggcgggtttttggttttgtggttagggtcgaggttttatggttaattaggcgtttttaggatttttgatttggtttggtgggggtggcggaggagttagttgaagaagttgttggtggggaggttggttttgtttttattagggtttaggattgagtcgtgggtttttgggtgggttggggacgagataaggggtttcgttgtgtttttttttttgggtgggtggtcggaggttttgagtgtagggtttggggaagtgagtagggttttttttttaggagtcgggtgagtttggttgggagttagtttgggtagtgaaattttgataaagttaatgaattgtttttttattgcgttgttttattgttttgggagtttttagttttagtttaagagtaggagtgggttgggtagtttttgaggagttcgagtagtttagttattcgtttgtttgttgtagggttggttagaggtgtaacgttatcggttgtattagtttatggcgttattcgttttagttttttagtttttattagttgattatttttttttgggttttggtatttagttaaggcgggttgtgtagggtttagtagggttggtttgggggttgggtagaaggtagattcgtaggattggaagatttttgggatgtagtaggttaagggtttttaaaagtttttagttttttatttttttttaaatgaggaaaattgaggttagagaggggtgggatttaatttatttagggtttagtgagtttttagtggtatttaggttgttttgagatagggtagagtatgtgtagtaagtgggaaggaatttagaggggtttttatttttttgttattatatttggtttaagagtgtagagttttaaggtatttttagtttatttttgtatttttttgtttatagt

SEQ ID NO: 2182 - DNA, 6615 bp, Artificial Sequence
  chemically treated genomic DNA (Homo sapiens)
gttatggatagaaaagtgtagaggtgagttgggggtattttggagttttgtatttttgggttaagtgtgatggtaagaaggtaggggtttttttgggtttttttttatttgttgtatatgttttgttttgttttagagtagtttgagtattattaaaaatttattggattttgggtaggttaggttttatttttttttggttttagttttttttatttggaaaaggatgggaggttagaagtttttggagatttttggtttgttgtattttaaagattttttaattttgcgggtttgttttttatttagtttttaggttaattttgttgggttttgtatagttcgttttggttgggtgttagagtttagggggaggtgattagttggtgggagttgaggggttggagcgggtggcgttatgagttggtgtagtcggtaacgttatatttttggttagttttgtagtaggtaggcgggtggttgggttgttcggattttttagggattgtttagtttatttttatttttgggttggggttggggatttttagggtagtgggataacgtagtgggaaggtagtttattggttttgttaggattttattgtttaagttggtttttagttagatttattcggtttttgggaaaagggttttgtttatttttttaggttttgtatttaggattttcggttatttatttaggagaaaaggtatagcgagattttttgtttcgtttttagtttatttaggagtttacggtttagttttgagttttggtgggggtagggttagtttttttattaatagtttttttagttggttttttcgttatttttattaggttaggttagaggttttggggacgtttggttggttatggggtttcgattttgattataaggttagggattcgtttgggattagtggatagatgtttttagtaaagttattagggttttaggggttagataggaaatttttttttttttttttttttttgtggtttttttgtttttattaagatagtttttaggatttgggggatagttagtttgaggtttttttttaaacgaaagaagtttagtttggtttttaggaagtgtgtggatatttttggagttgttgttttttggagtgggtttgtgattttagagttttatgtttttagtgttgggatggggaggtttggggagttaggttaggtgggggtagtttttatttgggggggtatagtaggtagcgttagttcggttaggagttgtaggaagtaagggaatagttttatgatcggtatttttttagacgtttcgagttagggggtttcgagggaaaattattatgtttatttttcggggagtttttggtataggaggagaagagttgagtggggggttggacgttttttttattgttgtttcgaggtttcggtcggtggttcgagtattttttggaagttttgcggagttaggagttcgtaggtaaggttgtggttggggaattcgacggggagcggttcggcggggcggggcgtcgaggggtaggcgggtttcggggatggttcgtcgggcgtttagtgttattttaggttttttcgtagttgggcggtcgttcgtcgatgtagtttttttcgtagatagtagtttttttttgagattgtagtcggttcgcgtttgggttttagggattgagtcggggcggggtttcgggtcggtttcgtttatcgtagacgaggttttcgagtcgagttttcggagcgttcggttagttcgtagcgttcggttagttcgtagcgtcggagttcgtagtgcgtgcgaggggttttcggtaggtttagacgtttcgtcgagtttagttcgtagtttttcgggtcgcgtcgcgttcgtttatagggtttatagttttgtttcggtttttagggcggttatttgggatgggggtatttaggagtttagcgttagtcgttaaggtttatgatttaatcgtttttgtaggaagggtcgttcgggatgtttgggaaggtagttatgtttatatttttagggggttaagggatttttagttaggttatatagatgaagaaatcgaggtttcgagagtatttttgtttgtatatgtcgaatggatataggtatttttggaaagtgtgtgtgtgttgtgtgtgtgcgcgtatttgtgtgttcgaggaattggtagagataaaatttaagtttacgtgattttagaattttaattcgatttattatttttttagttaggtacggatatagtgggttttttataggaaattttttagggtatttggttggaggattaggtttgttgtttttttgggaagtagtttttttaggttttttttgcggggtagttttttgtggtagagagtggttttatttaggtatttttttttggtttttggtcgaggaggaattgtacgttgcgcgggggtttgtgtgtatttgcgcgtgtgtatgggtatttgcgggtttgtgaatatttatgagcggtgtatttgagtttttgtgtggtttgagtacgtgtgattattgtatttttaaatacgtttttgtgtgggggttaggtttttttgtatttttgtatgtttgtgtgatttgttcgtgttcgttgtgtatttgggtgtgtttggaagtgtttgaatgtgtatttttcggtgggattgtgagtttgtacgtttgtttgtttttgcgtgtgtgtgtttgtttttgtgggtgaagattgtgtttttttttttgcgtttgtgtgtgtttttttttggttttggatttttttttattattattttttttattgttttttgtgtttagtttttaggttgtaggaatttggtaggattgggagttacgagttggttgggtttggggttggtgggtggttgtgggggaggagcgaggtttgggaagtggtttttatagtttatattttagttaagagtagggaggttagggtagttttagtttttattttagtgatttttgcgtttattgtttgtttgtttgtttatttacgaggggttgttagagatgtagtttgtttgtttggtcggttttaagtttggaggtttaggaggcgggggttagttattagttggttaagcggggtttgtaaggaatattttgacgagttttaaataagttggggttcgtggggtagataaattgttttttgggtttagaattattgtggagggttattgtgtatgtgtgtgagggtgagtaggtgtgtgtttgtgtatatatgtattgtatatgttgtttataatatttttgtatatatatacgtgtttgtgtgtgtttttagtttgggtatggatttgtgtatgtgggtataggtgtgtattgtgtataagtgtgtgcgcgtgtgtttaagtatttttattgtatatgtttgtttataattgagtgtttttagtatttatgtatgggatgtgtttattgtgtatgagtttgtattttttttttttttttttgagatagagttttgttttgtcgtttaggttggtagatagtggcgtaatttcggtttattgtaatatttgttttatgggtttaagcgatttttgtgttttagttttttaagtagttgggattgtaggtgtatattattatgtttggttaatttttgtatttttagtagagataggtttttgttatgttggttagattggtcgagaatttttggttttaagtgatttatttattttagttttttaaagtgttgggattataggtgtgagttatcgcgtttagtttgtatttattaatttgtttttttatttggtatgtattgtttgagttttgttatgttttaggaattgttttaggtgttagggatatgatatggagggtttttttgagtttatatttatggagtagggggatatcgatggttggggatgtcgaagtttttttttttgagtgaatttaatattttgggcgaagtttgtggtttttataagtgtattttagttttttattattaaattggggattatatttttttaaatttagttttttgggttgtgagatgaattagtttagggtaggtttagcggtagagattaaggagattttaatatttttatggattgaattaaagtttgtttttgtttatatttagtttagagtagttgtgttagtaattttgtttttttgttttttttttaaatttttgtaattttaattttaatttttagaaacgaggttttgtttttttttttaggttatagtgtattggtgtagtattggttatagtttattgtagtttttaatttttgggtttaagggattttttcgttttagtttttagaataattgggtttataggtgtgtgttattatgtttagttaatttaaaaattttttttttttgggggtaaagatagggttttgttattttgtttaggttgtgtttttttgtatattggttttattattgattagttatatcgttttaagtagttttttttgtttttagagttttagttttttttatttgtaggagtgggaatgataatagtatttattttatagggttgtgcgaggattgagaaagtatttttggtgtaaagaatggtagtaattgattacgatttttaatttaatttttgatttgtattagagaaataaaaatattatagttagattaggtgtagtggtttacgtttgtaattttaatattttgggaggttaagaaggatagattatttgagattaggagttcgagattcgtttggtaaatatggtaaaatttcgtttttatttaaaatataaaaattaattgggcgtggtgggaggtatttgtaattttagttattcgggaggttgaggtaggagaattatttgaatttaggaggtagaggttttagtgagtcgagatcgtgttattgtattttagtttggacgatagagtagaattttattttaaaaaaataaattaaaataaataaataaaaaataaattatagttatagagtagagttttgtagtatggatatgagatagaaaataaagaattttatgtttttgtttgtggtagtggagaaagaaaatggagcgatttgtataggtgtatataaatattaatttttattattatagtgtaggtttttaatttttaattgttattgaggtttttgaagtagatttaggtgtttagggggtggtagttagtgtttataatttaatatttaattgtttattattataattttttgttgttgttttagggagagaagtaatatttattgaatatttattatatgttaaatagtgtgtttggtgttttaattattttgatttattgaattttgattatattgtagtggtaggttttaattatttttattttgaagatggaaagatggaggtttagggagtttatgtaattttttaatagtcgtttagttatttaaaaaggaatagtgatggggattaagtcgagatttttttttaaaggtttttttagtgaatttaagcgttagtttttaattttattgtaaggacgttgaaggtgagggttgatgttttgagtcgtttttgggttttttttatgttggagtagaatggatgtttgatagatttgggatggttgatgtgtggaaggaaggagttttgattttaggagttgatttttatgcggggagtcgggtagatatagataaatatgaggggttgggtgtggaaatattgggttatgataatgtagtggattttgagtagttatggtttttagtttgtaggttagtttttggtttttaaggtattttgtaaatatagttttttatattattagttatcgtgttagtttgaaatatttgttttaatttattttagtttgtaggtttttagttttttgatttatttttttattttttagttatttttttattttttagtttttttgttgttttggttttatgaatttttttttagtgatgatttgtttttttttaacgataatttagtatttgtttttggagaggtgttttaagtggttttgggtaaatattttttgtttttgattttgtttttgagtttcggatttgggtggttgagaagtgtagtatttaaggattatttttttttttatgattggtagaaagggaaatagtgggtagttttgggttaagggtttttttattttatagattgaatttgtattatagttagtagttatttaaagttgttagtaagtagatgtttggttggtttttgtttttttgttttgttttttgggttgcgattttttgtggatttattttagtttttattttgagttttttttttttttatgtatttgttttaggtaggattttatggtttttttggtaattagtattgggtaagatatttttggtataggtttttatagtattttgaatttttttttattatggtatttggtttttagtattataattgtttagttgtttatttgttttgtttaaaagatggtaagatttaagagggtaggtattgtgttttttgtttatttttgtagtttttatattttgtttagtgtttgggatatagtaggttttaattgatatgttttgagttggattaatttttagagattagatttttcgtatggggaa

SEQ ID NO: 2183 - DNA, 7111 bp, Artificial Sequence
  chemically treated genomic DNA (Homo sapiens)
gaatatggttgatttgggtttattgggagtttttttaaggggcggggtttagtttttattattttttttattaaggtggttaagaatttttgtagttttttataatttataaagtattgttttagaagttatatttttatgaggggaggtagggtaggtattattaggttcgtttataggtggttaatagagggttagagaaattagtgatttggggagtttatatagttgttagatgtagtttggtattagttatcgtaggagggtttatttcggtttgagtgtaggtagaacgttgtgatattgagtgatatggataagttattattttgagttttttatttttattaatagagaattattattttcggtttgaaggataggttgtttgtaggtgattgtcggggttacggtaatagttttttttttgttaggtttgggattcgagttgtagggagttaggtgtatggttttttgtggtgtttgtgtggtttaggaagagaggggttgtatcgtgtgtgtgtgtgtgtgtgtgtgtgtgtgtgtgtgtgtgtgtgtgtgtgtgtgtgattgtgtgtgtgtatttgagtattcgtgtttttgtgtgatgttatatgttaatgtgtttttgtgtgtgtgtgtgtgtgtgtgtgtttttgtgtgttggtatgtaattgtaatgtttttttttgtttgtgtgtgtgtttgtgagtgtgtgtgtttgagtgtatatgtgtttttgtttttaggtgtttgtatttaaattgagggtgtgtttgtgtgtttttgtgattgtgtgtttttgagtcggtgtgtgtttgtaattgtgtgtgttatatgaaatagaagtagatgtagtgagaatgagagggtttaattttttttatttttatataaggattttttattagagtggagagaacgagttttttttagttatatttaggagttttcgggtggtatttggtagttggtgttattattttaagtatttatataaatgggttatggaggtagagtaataaggattttagtttttggtgagagatttttaggttagggttttggtagatataagtttggtgattttaggtagttggtaattattgggtatttattaagggttagttacggttttaggtttttagcgtgtatgaattttttggtttttttcgttatttttttgagggtgtgttaaggagagaggaatttggattttggatggttacggggtttttttttatttatatttttatatggttgtatagtataggttggttttgttggattgagtttattcggggaagaatagcgagattttcgggtgagatcgggtttattggagataaaaagtatggtaggagttggaggcgttttaggttgattttcgggataggagttttttgaatatagggattgagtatttttatagttttttagattggtttatgagtacgagaagttttgagagtgcgtggggatggtttgtgtgtaaggtagcgtagcgagtttttttgtataatttataggttttgttgggtgaggagtttttttttagttttttttggagttgacgttgggggagagcgtcgtgagtttttttgtttgaatttttatttgcgttttatataggaggaaattgaggtacgtagagttttagttttttttggttagagttaggatttgaatttaggcgttcgaattttggtgattttgcggggtagagtgagttgggggttggaattttattttttataaagtgtttagtatagggtgggtttttatagagggtaagagttggggggcggggttcggtcgggtgtgatttttttttttttttgttttttttagggtgggatttttttttggtgttttggtatttatttgtgtttttatttgtagaggtaggaaggatttagttttagggatgtttttttgttttttaataggttttttcgttttaggtttttttttttttttttttttttttttttttttttttagatggagtttttttttgttgtttaggttggagtgtaatggtgtaattttggtttattgtaatttttattttttgggtttaagcgatttttttgttttagttttttaggtagttggtattataggtatgcgttattatgttcggttaatttttttttgtatttaatagagatcgggttttattatgttggttaggttggttttgaatttttgattttagttgatttatttattttagttttttagagtgttgggattataggcgtgagttaatgcgcgtagttaggtttttttttttttattttgtttatttaaatttttagtttgagttagagtttaagattttgttggattttatggttattttttaagagttttagaggaggagggatgtttttttagttttggttttttagagtttgttatttagattttagaggatattgtgttatttttttattgtttttcggtttttatttttttgtttttaggggtttttgtttttgattttttggttagaatttttggtttgaaagggtgaggtgaatttattaatttttttgatggtttgacgatttttttagttttttttttttttttttttatttggtttatggttcgtttttttatttgttggggtttttataggttttgaaggttttgtgggttcgaaatttagttttttttttttcgtaaagcgttgtttttgaggttttttttcgttgtttagttttatatttatattgattttattttattttttttatatttttattttaaaaggaagatggagaggtggaaatatttttttgagattatatcgttggtgagcgatagagtttggaagagaagttaggtttgttgttattatttttttttttatatatttatgtttttttggagagtttaattttttcgggttttttattgttgttaggtttagggttggaattagtaatatttgagttttttttgagttgatagtaggagttttagtttacgtgtgtggtagggattttcgatttatagcggggtaattttaggataggttttaggggttggggtataggtttttttgtgggtatagtttttgagtttttttgggggttggtattaagttttgggttagggaggaattttatggatgtgagagttttattatgttagtgaggagatcggttataggtttttgagatttgggatagtagacgtagtgtaattttggggattttaaatagggtttttattttagaggaatggatattttatacggtttgggtttaggtagatttatatgggttttatttgatttaagtttagtttgaaggagagaagtttttgtttaattaggtaagaggagatttttaagatagttagggtgatttgagtttttattttaggggtgttttataggggtaattagtaaggttaggggatggtttattattatttttgtgagttgagggttattatatgattgtggtttttttgagaatgttgttaaatattttaggatgtattatagagttttttatagtatagtattgtttagtttaatatgtttaaacggttaggattaggagttttgacgtttttcgggtttggttaagagtagtatttaaggttttagtttttgaggaggtagtattatagttttacgtaaagtatttggttagtagttggtggtttgtcggttttcggttttgtttgattagttatgtggttttgaataagttattgaattattttgagtttattttttttattttatgaaaatggaaattataagatatatttttagacgaaaggtaatgtttgcgattgtttttagaaatagggttgttatgtgttttaattagtagtattttttaggttaggaatgttatagggtttagataataattaaattaggttttagggttttataaagtgaaggttattatagttgggaggagagggagatgtatgaagtgtgtggaatttggggagagtttaggtagaatttaggtaggttgggtttatatagcgtttttgagttttggttgtgtgttacggtatagtatttcgtttttttggggatagagtttttttgtttattaaataagggaggttagtggagatttttaaggattgttgtggtgtgtggaagttattgttgattttgatttaatttatttttttagtaattttgggtaagttttttatgtttttcgtgttttagttttttattttttaaaatgggggttagatgttgtggtttatgtttttaattatagtattttgggaggttaagtagggaggattttttgaggttaggagtttaagattagttagggtaatatgataaaattttgtttttattaaaatataaaaaattagtttggcgtggtgtgtacgtttataattttcgttatttgggagattgaggtaggagaaacgtttgaattcgggaggcggaggttgtagtgagtcgagattatattattgtattttattttgggcggtagagttagattttgtttttaaaaatataaaataaaataaaatggggttgtggtatttgtattttaaggttattatagaggtaagtggagttgtagagagtaaggatttaagatttagtcggttaggttgagggatgtttgttttttttgtttgttgattttgggtttgagttttatttttttgggttttggtttttttatgtgtaaaaggaagatagtagtattattattttataggattgttataagaaagtaatgagttaatatacgtgtgtttagaatagtttttggtataagttaagtattttatacgtgtttgttattttttttatttttttaatgatgatggtgtaggaaagtgtttgtaatgggttgggtatatggtggatgtttaataatttatggttgtaattatataatgttagtttttggttattgggagttattatgtgttttgatttggggtttggttttttgtttttgttttgtaggataatattattttttgttttatggggcgtttttttgttggtaggtttgtgttgtttggtttttagttttttggttgaggatttttaggaagatgttgtttaaaagacggatatattttattatgattaaggggattgggaggattttgtttgttagaagattttttataacgttatcgatttcgtttttgatttgtataaagagttggttgatttattataaattagtaatgttttagttattttaataagcgtggttatggtttttgtaatgttttttttggggattaaggttgatattcgtatagagattttggaaggtttgaatgttaattttatagagacgtttgaggttaagatttacgaatgtttttagtaagttttttaagtttttagtaggttagatattcggttttagttgattatcggtagtagtttgtttgttaataagagtatgaagttagtggatacgtttttggaggatattaagaagttgtattatttagaagttttttttattaattttagggatatcgaggaggttaaagagtagattaataattatgtggagaaaagaattggaagaaaagtagtggatttggttaaatatttgaaaaaagatataagttttgttttggtggattatatttttttttacggtaaggtagtattatttgtttaagttcgttttattgaaataatttaaatatatttttaaattattagtttttaagtttttttagataatgtattatgagatatggtagggtatttaatatggattttgtaattttttaaatataaataataaaatattttttatgattaaataagattgaagaatgatgagtttaagatagttaaattattattttttttatagattttgttagagtttttattgttttaatatttattggaaatttttaatagggagggggtagaatatgaaatgttttttatatgttaaagttagaaaaatattttgtggtatatgtataaaggaatagttttatggaatatattttagacgattttagtgttttagaagtagtgttagttttgtcgtttaaaatattggggtttaaattttgtttttattatttattagtttttgataaaggataatgtattttatttttttgaggtgttaatttttcgttttagtatggataaaatagtatttttgttgttaggttgttttaaggattaaataagtgatagatattatggggatggtgtgtggtatatagtaggtgatggatttttttgtattttaggttgtttttttgtttttgaggggttaaaatgttagggtgttgggggttttagggtattttaagttagtttttattgttttaggaaaatagtataggggaggggaggtggaggtaaggttaggggttgttttttttattttgaggtttttttgtttttgaggtaaaggagggtagtggagagtagttaggttgtagttagtatagttgaggttcgggttttgttgtggttttagggtaggtttaggtttttttttagttttcgttttttttttttgtttaatgagaaagttgagtttaagggtttttgaggtatttgtttatttggtatgtttcgatggtgaagtttttttggtacggtagaggggagtttgtttaggtatttgtattttttttgtttatttagggaaaggttttaggagaagtaagtataatgttgttttcgtattttaatagaattagttttttgtatgagattagaagtttttagttaaaggtggtaaggtataaggagtttcgattttatttattaatttttattaattatttttaagtcgttatcgaataaatagagttaaatataaatgttttttttgtggtattaggattttgttaattagtttaagtatatagaaattttggatttttttttatttttaggtgatttttataaaagttttttagtagttagatagttttatttgaattttattttatagatgataaagttgaagtagagggaagtgttttgttaaaggggtttagggttttttttatttatatatttttatttttttattttatatttggttgatgtttatttttttttttttttagg

SEQ ID NO: 2184 - DNA, 7111 bp, Artificial Sequence
  chemically treated genomic DNA (Homo sapiens)
tttggaagaaaaggaaggtgggtattagttaggtgtgggataaaagggtggaagtgtgtgaatgaaaggagttttgagtttttttggtaggatatttttttttgttttagttttattatttgtaaaatgggatttaaatggaattatttggttgttggagagtttttgtgagaattatttgaagataaagaagaatttagagtttttatatatttgaattaattggtaaaattttggtgttatagaagaagtatttatatttggttttgtttattcgatagcggtttggggatggttaatgaaagttaatgagtaaaatcggaattttttatgttttgttatttttggttggaggtttttgattttatgtagagggttggttttgttgagatacgaggatagtattgtgtttattttttttgaggtttttttttggatgagtaggggagatgtagatgtttaggtagatttttttttgtcgtattaagaaagttttattatcgaggtatgttaagtgggtaggtgttttagggatttttgagtttagtttttttattggatagaaggaggagacgggggttggagaggggtttgggtttgttttaaggttatagtagagttcggattttagttgtgttgattgtagtttggttgttttttattgtttttttttgttttaagagtaagggagttttagagtggaggaagtagtttttggttttgtttttatttttttttttttatgttgtttttttgggataataggagttggtttagaatgttttggggtttttagtattttggtattttaattttttaggggtaggaaggtagtttgagatatagaagagtttattatttgttgtatgttatatattatttttatggtatttgttatttgtttaatttttaaaataatttgatagtaaggatgttattttgtttatgttaagacgggaaattagtattttagagaggtagaatgtattgttttttattaaaagttagtaagtggtagaggtaggatttgaattttaatattttagacggtaaagttgatattgtttttgggatattagggtcgtttaaagtatgttttatgaaattatttttttatgtatgtgttataaaatatttttttggttttagtatgtgggaagtattttatattttgttttttttttattagggatttttaatgagtattaggataataaaggttttgataaggtttgtagagaagatgatggtttggttgttttaaatttattattttttaattttgtttgattatggaaagtattttattgtttgtgtttggaaaattgtagaatttatgttaaatgttttgttatattttatagtatattgtttaggaaagtttaagaattagtaatttgagaatatgtttggattattttagtggaacgggtttggataggtagtgttattttatcgtgaaaggaaatgtaatttattagggtaagatttgtgtttttttttaggtgtttgattaaatttattattttttttttagtttttttttttatataattgttgatttgttttttggttttttcggtgtttttgaagttgatggaagaggtttttgagtggtatagttttttggtattttttaaaaacgtgtttattagttttatatttttgttaataaataggttattgtcggtggttagttggagtcgggtgtttggtttgttgagggtttggagaatttgttggaagtattcgtggattttggttttaggcgtttttgtgaggttgatatttaggttttttaggatttttgtgcgagtgttagttttggtttttagggagagtattgtaaaggttatagttacgtttgttggggtgattaagatattgttggtttgtgatagattagttagttttttgtataaattaaaggcgaggtcggtgacgttataggagattttttggtaagtaaggtttttttagtttttttgattatggtgggatgtattcgttttttgggtagtatttttttggggatttttaattagggagttggggattaggtagtataggtttgttagtaggaggacgttttatgagatagagaatggtattgttttgtaagatagaggtagagggttaggttttaagttagggtatatgatgatttttagtgattagggattgatattgtgtgattgtaattatgaattattaaatatttattatgtgtttagtttattgtaaatatttttttatattattattattgaaagaataagaaagatagtaagtacgtgtaaggtatttagtttatgttaagaattgttttaagtatacgtgtgttaatttattgtttttttgtaataattttgtgaggtggtaatgttattattttttttttatatatgaggaaattaaagtttagagaggtgagatttaagtttaaggttagtaaataggaaaagtaagtattttttagtttggtcggttgggttttgagtttttgttttttgtagttttatttatttttgtaatgattttgaggtgtaaatgttatagttttattttgttttattttatatttttggagatagagtttggttttatcgtttagggtggaatgtagtggtgtgatttcggtttattgtaattttcgtttttcgggtttaagcgttttttttgttttagttttttaagtagcggggattataggcgtgtatattacgttaggttaattttttgtattttagtgaagatagggttttgttatgttgttttggttggttttgaatttttgattttaagggattttttttatttggttttttaaaatgttgtgattagaggtatgagttatagtatttggtttttattttagaaaataggaaattggggtacgggaagtataagggatttgtttagggttattaaggaagtgggttaagttaggattagtaatgatttttatatattataatagtttttggagatttttattgattttttttatttaatggatagagaagttttgtttttagagggacgggatattgtatcgtgatatatagttagggtttagaggcgttgtgtaaatttagtttatttgaattttgtttaggttttttttagattttatatattttatgtatttttttttttttttaattgtgatagtttttattttataggattttggagtttggtttgattattgtttgagttttgtgatatttttggtttggggaatgttgttgattaaagtatatgatagttttgtttttaggggtaatcgtagatattgtttttcgtttaaagatatgttttgtaatttttatttttataggatgggaaaggtgaatttagagtggtttagtaatttgtttaaggttatatagttggttaggtagaatcgggagtcgataagttattagttgttggttaagtgttttgcgtagagttgtagtattgtttttttagaggttggggttttggatgttgtttttggttaggttcggaggacgttagggtttttgattttggtcgtttggatatattgggttgggtagtgttatgttgtgggggattttgtggtgtattttaggatgtttgataatatttttaagaaaattatagttatgtagtgatttttaatttatagggatggtgataaattattttttggttttgttgattgtttttgtggagtatttttggggtgggggtttagattattttggttgttttgaaggtttttttttgtttaattggatagaagttttttttttttagattggatttaagttaagtgaggtttatgtgaatttgtttgggtttaggtcgtgtgggatgtttatttttttgggatgggggttttgtttagggtttttaggattgtattgcgtttgttgttttaggttttaggaatttatagtcgatttttttattgatatgatggagtttttatatttataaggtttttttttgatttagggtttaatgttagtttttagggagatttaggggttgtgtttatagaggagtttgtgttttagtttttggagtttgttttggagttgtttcgttatgagtcggaggtttttgttatatacgtgggttgaggtttttgttgttagtttaggggagatttaggtattgttggttttagttttgggtttaatagtaataagggattcggggaggttgagttttttagaaaaatatgagtgtgtgggagaggaagtgatgataataggtttggttttttttttaggttttgtcgtttattaacgatgtgattttagaaaagtatttttatttttttattttttttttgaagtgggaatatggggagaatgaggtgaaattaatgtaaatgtgaagttggataacgggaaggggttttagaagtagcgttttgcggggaggagagggttgggtttcgaatttataaagtttttaggatttgtgagggttttagtaggtagaggagcggattatgaattaggtaggagagagggaagaggggattgaaaaggtcgttaggttattagagaagttaatgaatttattttatttttttaagttaggagttttaattaagagattaagggtagaggtttttgggggtaggaaggtggggatcggagagtagtgaggagatgatatagtgttttttggaatttgggtaataagttttgaagggttagagttaaaagggtatttttttttttttgagatttttagggagtggttatggggtttaatagggttttggattttggtttaggttggaggtttgaatgagtagggtaagaaaaagagagtttggttgcgcgtattggtttacgtttgtgattttagtattttgggaggttggggtgggtggattagttgaggttaggagtttaagattagtttgattaatatggtgaaattcggtttttattaaatataaaaaaaaattagtcgggtatggtagcgtatgtttgtaatgttagttatttgggaggttgaggtaggagaatcgtttgagtttaggaggtagaggttatagtgagttaagattgtattattgtattttagtttgggtaatagagggaaattttatttgaaagaaaaaaaaaaaaaagaaaaaagaaaaaaagagtttgaggcggaggggtttgttggagagtaagggggtatttttaaggttgaattttttttgtttttataggtggagatataggtgaatattaggatattagaggggagttttattttggggaaggtaggagaaggggaaaattatattcgatcgagtttcgttttttagtttttattttttgtaggggtttattttgtgttgggtattttgtgagaaatggaattttaatttttaatttattttgtttcgtaggattattaaggttcggacgtttgggtttaaattttggttttggttaagaggagttaaaattttgcgtgttttagtttttttttgtgtgaagcgtagataagaatttaggtagggaggtttacggcgtttttttttagcgttagttttagaggaggttgagggagaattttttatttagtagagtttgtgggttgtgtagagaggttcgttgcgttgttttgtatataggttatttttacgtatttttagggtttttcgtgtttatgggttagtttagggggttgtggggatgtttagtttttgtgtttaggaaatttttgtttcggaaattagtttggggcgtttttagtttttgttatgttttttgtttttagtgagttcgattttattcgagggtttcgttgttttttttcggatgggtttagtttaatagaattagtttgtgttgtgtagttatgtggggatgtgggtggaagggagtttcgtggttatttaagatttaggtttttttttttttgatatatttttagagaggtgacgagaggagttaaggaatttatatacgttaggggtttggaatcgtggttgatttttggtagatgtttagtaattgttagttgtttgaagttattaggtttgtgtttattaagattttggtttgggaattttttattaggagttggaatttttgttgttttgtttttatagtttatttgtgtgggtatttagggtggtgatattagttgttaagtgttattcgagggtttttgggtgtgattgggaaggattcgttttttttattttagtgaggggtttttgtgtgaggataaagggagttagatttttttatttttattatatttgtttttgttttatgtaatatatatagttatagatatatatcgatttagagatatataattatagaaatatatagatatatttttagtttagatataaatatttagagatagagatatatgtgtatttaggtatatatatttatagatatatatataaataaggaaagatattatagttatatgttaatatatagagatatatatatatatatatatatataaagatatattgatatatagtattatatagagatacggatatttagatgtatatatataattatatatatatatatatatatatatatatatatatatatatatatatatatatacggtgtagtttttttttttttggattatatagatattataaaaggttatatatttgattttttgtaattcgggttttaggtttggtaggggggaagttgttgtcgtgatttcggtagttatttgtagataatttgttttttaggtcgagggtggtgattttttgttagtgagaatgggaggtttaggatggtgatttgtttatgttatttagtgttatagcgttttgtttgtatttaggtcggggtgggtttttttgcggtgattgatgttaggttatatttagtagttgtatgagttttttaaattattgatttttttgattttttgttgattatttgtaagcgaatttgataatatttgttttatttttttttatggggatatagtttttaggatagtattttgtgagttataagaaattgtaaaaatttttagttattttgatggagaagataatgagaattagatttcgttttttgggagggtttttaataagtttagattagttatgttt

SEQ ID NO: 2185 - DNA, 5886 bp, Artificial Sequence
  chemically treated genomic DNA (Homo sapiens)
tttgtttatatgatttgattatttagtaggtttggatttttaggttttagagatttcgggattgttttttagtatttgaatgtggtatataagtgttgatattaaaagggatatgtaggaaagataagattataggtagggtattgtttgattaggacgaggttcgaagtaaaagtttttgtttgtttttggtattttttgataattgttgttttatttttagaatttatttattgatttttatttatttttagtattagttacggttgttttagtatttcggttttgttaattattgtaggttttgattaaggaggtttttgtttatggggtaaggttaaggggtgggttttgggaggagggtaagattgtagtgtagattcgagatttagggaggtggggttagttttttatttaatgagtttgtttgttgtttagttttattgtatagggtttttttatttttttttttgttagttggatttaagggataggttgggaattgtgtagggtataattggtttttttttattatttttttcgatgaaagtttttttttttttttttttgatgagtttttagatttatattgaatttttattatggagttggtttttgaggcgggtttagggtatgggaaaggagggagggagggttgggagtttttggtgtttgtttaaagagatagtattaggattaatatagttttttgatgaatttggatttgtgtaagttatattggttttgttgatttttgttagatcgttgtgaagagcgttggtgagaagggtttaaagttggagtattaattattatagattgattagatttgttttgggagtttgtatataaatgtagttaattatgatatgattttttttttttgtttatattttgtttatataatttcgttatatttattttaatatttgtttataggtagttttagattttgatttatagatatatgtttgtttattttaataggattttaagttttttaaagaaagggattggttttttaatttttttttgttttttttaatgtttatgttattgttagtgtgtttaatttttgtattgaatttatataaatagaaatgaaagaaaaatattggagggggttattatttttttttatgattttttattaaagttaggtggtttaatttgattgagttgtattgagaaatgttattattatatggtttttttatgttaatttttttatttcgtagtttgtatttagattggaaatgtgagaatgttttttgagagagttaaggaattttttttttagaattttttttagtttttttgaattaaatttatatttttttaattaggaggggttttgaaatggagagtttttggttttaggttattgtttatatatatttaaggatattttttggattgtgaaaaattaaagggagtttaatggatttttttttagaatgttttgattgttaattattttgatgaaaaaataattttttgtaggttttgagttttttttagttagaatttaaaatttgatttttgtttggatagattgattgagattttttatttttgttgaatttaaatgtttttaaagtaaatattttatttaggttgtgaagagatgaatatttgatgtttatgttgatattattgaattgtttatagtttaatagtgatagatttatttaaagttatttattttagattttatattagaaatttattaaagtttattttttttttgttttttgttttgagttgtagtggagtagaaaaggggatgttaagttatttaagttttaagaaaatagacgaaaaatggatgtaaaaagaaaggttatgatttggtgatttagaattgtttttaaggtttagttatttattatttagtaagaatataatttatgatatttttaggttatttggatgatgattgagggattagatatatttaagaggatgttttttttttatttttgtaattttagaggtggtattatttaacgtttaaagtggagtttttttttggttagtaagagtttaagtttttttatttttgattatatttgtataagtatttagttttttttagatgaaaatgttgggatgagtgagtaggtttaagatggttatttgttagggtggatggttttttttattttcggttaaataaatagttttgttattgttttttgagtttgattttttttttatttttcgggttgtaggtttttgtggaatattaattaggtttttgagattttaggaaagaataaggtttttttgttcgggggagttatggagggttttgtttaagttttgattttgtgttggggagaaagggaatagtggggttattgatttttttttttttttatttttaggttttagagattttttttattagaaaagtttaagagtttgggggtggggaggagttggataggtagagaaggaaaatggtagtattgtttatttttaagtttttttttttgatttataggttgaatttagtattttaatttgttgagaaagaggaagattaatttttggaatgttttttgagaataataatcgattttagttgttgtgtttttttttgtggtatatatgtgtgtatgtgtatatttgtatatatgtatgtatgtgcgtgtgtatatatatagatatatttatgggttagttttgaaaagatattttttttaagtacgtttgtaaagtttatgttgagtaaatttagtttttatttatagtagtatagttatagattgttttttatagaggttaagttttttggtagtaatgttttagtttttggaaaaggaagttttgttttaaatgttagttgtttattttgtttggtttgggtttttgaggtttatttttggtgtgatattttttgaaggttaagaaagggttgttattttaggggatggtgggtaataggatttattttttttgtgtttttgagaatagaggtaaatgtttttatttcgatgtttttatgatagagataatttgatttttttaaatttgtttatattgatgtaatttagttatgtaaattattaggtatttatgttttttgggttaaaaataaattgtaattaatgttaatagaattaggaaaaggagttttttttttttggtattttatagaaaagtgagtgtggtttggagaaatgtttgaatataaaaatttaagtttaagtaattaatataatttatttttattgtataagttgttataatttgtttatttaaaaatagtagttttttagtatatttgttgagtatttgtgtgtgtgtatgtgtatattgtgtttatagatatataaaattagtgggtatatatatatatatttatatatatatatatatatgaattaagatattttttttgaagagtttaatatttttattttttttatattttagggatttggtcgagaggttagaggaagttatttttttttttatttagttagttatttatttggtatttgttaaggtttattttatatgatattttagagtatgggattagtatttggaatatagttgtttttagagtttgtgattttttgtgtgttttttttgttttttagtaatattggtatagggtttgggatattaggtttggggattttagggatttttagtattttaagatatatgtgtttttaggttttggtgtgtttttttagtgttagaaagatgttttatgttttgttgattttgtataaagtttgtttgtagttgttttgatagaattttagcgtataattgagggtggggatattagttaagttgtattataggaggataaaattgttatataaagtgtttaaaattattaagtttgtatttttattattgggagtaatattaaattttttattttttaatttttattttttgttttgtgttagttttattttgtttggattgttttttttatatgtaaattaagaagaattaagtattttttgtaataaatatatacgatgtttaaaaatgtttaggagtatttaatttttaaagttttttttatttggaatgttttttatgttaaaattttgtttgataatattagtatttttggtttgtatttatttttttttggaattttaagtgtatttattttttgttattatttatttggttgtttgaattgttagttgaaaatattaggtttatttagttaatttttttttaggaaattaaagatttttatatggtagagtttgtgttttttttttttttatatttcgtataatatttagtataatgttgggtatatagtgagtattttataaatagttgatgaatgattaaaataagtaagtaaataaatagattagaataataagaaagaagggattgattttataatttttttggtttgttatttgaattgttgaattattattatttattaaatattttttaaattttggtaataaaaggtaaggatttatttttttttttttttttttttttttttgagatagagtttcgtttttattgtttaggttggagtataatggcgtaattttggtttacggtaattttcgtttttttttgggtttaatagatttttttgttttagttttttgagtagttgggattataggtatacgtttatgttcggttaatttttgtatttttagtagagacggggttttgttatgttggttaggttggttttgaatttttgattttatgtgatttatttgttttagttttttaaagtgttgggattataggtatgagttatcgtgttcggttaaagatttatttttaagaatgaaataaagtaaggattttgggttaattttatatgttgaaagttaaaatttttagtcgtttttgttttttgatttcggagtgtttattattttcgagtttgtgagtatagggtttggtagaggggtttgagtggtatgagttatttattggatgtgtttgattgtttttttttttttttttttaggtttgttagagtgttgtgtaagatgtttggtaggggttttttttgtttttttggtggttattggattgtgtttttttggggtggtattgttttgtggttgtggatatgaagtttttattggtatagaaaagttaattgagatttatttttttaaaaattattaagattatgagtattttattaatgtgtaagtatttgtttttttatatagatttattttttttttttttttttttattttggagatagagaattttttagtattttagtaattagtaggggattggggtggagttagatcggattttcgagttttttttttgtgtagattttttttgttttatattcgaagtttatttagaaaggaggggtttgtttgtttgtttgttagttttttttattttcgtttttttgtttttttatacgtgttttgatttttgttaggtgtggtttatattgtttaagttggagtttttagcgtagtaggtatggagaagttaagggaggtattaagttttttttgtttttagaataagttaggtttttgtttttttatttatttttttttttgtttagttttttatttttgtgagttagtatgtttgaagggtggggtagggagagtaggtttttggttttttaggttttagggtaagtaaggtgtggcgggaggggtatatgtttttggttatatatattttgtttttatttattttaataaagataaggtgaaagtatgtaggaggaatttggtgatttttttagaaaatttttagttttgttaaggtgttcgttttggtgtatattttatttatgtcgggaaagaagttaggtttttaattaataagattttttggtttcgtttgtttatttgttaatgtagg

SEQ ID NO: 2186 - DNA, 5886 bp, Artificial Sequence
  chemically treated genomic DNA (Homo sapiens)
tttgtattaataggtagataaacgagattagggaattttattaattgaagatttggtttttttttcgatataagtgaggtatatattagagcgagtattttaataaggttagggattttttagaggaattattaggttttttttgtatgtttttattttatttttgttgaaataagtgaagatagggtgtatgtgattagaaatatatgtttttttcgttatattttgtttattttgggatttggagaattagggatttattttttttgttttattttttagatatgttaatttataggagtagggagttagataagaagaaaggtgggtgaaggaataggagtttaatttgttttaggaataggagaggtttagtgttttttttggtttttttatatttattacgttggaggttttaatttgggtaatatgaattatatttagtagaagttagaatacgtgtaagaaaataagggggcgggggtgggaggggttgataggtaggtaggtagattttttttttttgaatgggtttcgaatgtggagtaggagagatttgtatagagggaagattcgggaattcggtttggttttattttagttttttgttagttattaaggtattgaagagttttttatttttaggatggagagagggaaaaaaaagatgggtttgtgtgggagggtaggtatttatatattgatgagatatttatagttttggtagtttttggagaaataggttttaattagtttttttgtgttagtgagggttttatgtttatagttatagaatagtgttattttaaagaaatataatttagtggttattagggaagtaaagggggtttttattagatattttgtatagtattttaataagtttggggaagaagaaggggaaatagttaggtatatttagtaggtagtttatgttatttaaatttttttgttaggttttgtgtttataggttcggagatagtgggtatttcgaagttaaaaagtaggagcggttagaggttttggtttttagtatgtgagattgatttagaatttttattttgttttatttttgaaaataaatttttggtcgggtacggtggtttatgtttgtaattttagtattttgggaggttgaggtaggtggattatatgaggttaggagtttaagattagtttggttaatatggtaaaatttcgtttttattaaaaatataaaaattagtcgggtatgggcgtatgtttgtaattttagttatttaggaggttgagataggagaatttgttaaatttaggaggaggcggaggttgtcgtgagttaagattgcgttattgtattttagtttgggtagtaagagcgagattttgttttaagaaaaaaaaaaagaaagaaagaaaataaatttttattttttattgttagaatttaaaaaatatttaataaataataataatttagtaatttaaatagtaagttagagagattatgaaattagtttttttttttttattgttttagtttgtttgtttgtttgtttattttagttatttattaattatttatggaatatttattatatgtttagtattatgttgggtgttatacgggatatgaagagagaaaagatatagattttgttatatgggagtttttaattttttgaggaagaattagttaagtagatttaatatttttaattaataatttaggtagttaagtaagtggtaatagagggtaaatgtatttggagttttaggaagggatgagtgtaggttagagatgttggtattgttagataggattttagtatgaagagtattttaggtggaggaaattttggaaattggatgtttttggatatttttgagtatcgtgtgtatttgttgtaaagaatgtttgattttttttagtttatatatgggaggagtagtttaaataggatggagttagtataggataagaaatgaaaattggaaaataggaggtttgatattatttttaataataaaaatgtaggtttaatgattttggatattttgtatggtagttttgtttttttataatgtagtttggttaatgtttttatttttagttatacgttgagattttgttaaaatagttataaatagattttatataaagttagtaaagtatgaaatatttttttggtattagaggaatatattagggtttgggaatatatgtgttttaaagtgttaagagtttttgagatttttagatttggtattttaggttttatgttagtgttgttgagaaataggagaggtatataagaagttataggttttgaaagtagttgtgttttaagtattagttttatgttttaagatgttatatggagtgaattttagtaaatgttaagtagatgattgattagatgaggaaaagaatggttttttttggtttttcggttagatttttaaaatgtagaagaaatgagaatgttaagttttttagaaaaaatgttttaatttatatgtatgtatatatataaatatatgtatatatatttattgattttatatatttataaatatagtatatatatgtatatatataaatatttagtaaatgtattgggaagttgttatttttgaataagtaggttgtgatagtttgtataataaaaataaattgtattaattatttaggtttggatttttgtatttaagtatttttttaagttatatttatttttttatagggtattagggaaaggggatttttttttttgattttgttaatattagttatagtttgtttttagtttagagagtatgaatatttagtgatttatatggttgaattgtattagtgtgaatagatttggaaagattaaattatttttgttatgggaatatcgaggtagaggtatttgtttttgtttttagagatataaaaggagtgagttttattatttattattttttgaaatgatagtttttttttggtttttaaagagtgttatattaaagatgagttttagaagtttaagttaaataaagtaagtagttaatatttggagtagaatttttttttttaagaattaaagtattgttgttaggaaatttggtttttataagaagtaatttgtagttgtgttgttgtgagtggaggttgagtttatttagtatgaattttgtaaacgtgtttgggaagagtgtttttttagagttggtttatgggtgtgtttgtgtgtgtgtatacgtatatgtatgtatgtgtataaatgtgtatatatatatatgtatattatagagaaaaatataataattgaaatcgattgttgtttttagaaaatattttagaaattgattttttttttttttaataggttaagatattagatttagtttataagttaagaaaaggagtttagaagtaaatagtattgttattttttttttttgtttatttaatttttttttatttttaaatttttagatttttttagtaaagaaagtttttgaagtttggggatggggggagaagaaggttagtgattttattgttttttttttttttagtatagggttagggtttggatagagttttttatagttttttcggataaagaagttttgtttttttttgagattttaggagtttgattggtattttataggggtttgtagttcggggggtggggagggggttagatttagggaataatggtaggattgtttgtttagtcgagggtaagaagagttatttattttagtaagtgattattttgggtttatttatttattttagtatttttatttgggaagggttaagtgtttgtgtaggtatggttagggatggaggaatttgaatttttgttagttaaaagagaattttattttaagcgttaggtgatgttatttttagggttgtaaagatgagagggaaatatttttttgagtgtatttgattttttaattattatttaaataatttgagagtgttatggattgtgtttttattgggtgataaatggttaagttttaggagtaattttgagttattagattatagtttttttttttatatttatttttcgtttatttttttagaatttgaataatttagtatttttttttttgttttattatagtttaaagtaagggataagaaagaagtaggttttaatgagtttttaatgtaaagtttgaaataaatgattttagataaatttattattattaagttataaataatttagtaatattagtataagtattagatgtttatttttttataatttagatgaaatgtttgttttgggggtatttaagtttagtagaagtgaagaattttagttagtttgtttaagtaagaattagattttagattttaattgagaaaaatttagagtttgtaagaaattatttttttattaaagtagttgataattaaagtattttgagaaaagatttattgggttttttttgattttttatagtttaagaaatgtttttgggtatgtgtgaataatagtttaaagttaaaagttttttattttagaattttttttggttgaaagggtgtgagtttgatttaagaaggttggaagagattttaggggagaagttttttggtttttttaagagatatttttatatttttagtttaagtatagattgcgagatgagagagttggtataaaagaattatatagtaataatattttttaatgtaatttagttagattaagttatttgattttgatgaaaggttatagagaaaaataatgattttttttagtgttttttttttatttttgtttatgtgaatttagtataagaattaagtatattagtagtgatatagatattaggagaaatagaagggaattaaaaggttagtttttttttttagaaaatttgaaattttgttggggtgaataaatatatgtttgtgaattaaaatttaaagttatttataagtaagtgttaaaatggatataacgaagttgtgtgggtaaaatgtaagtaaagggaaaagattatgttatggttggttatatttgtatataaatttttaaaataagtttaattaatttgtgatagttgatattttaattttaagttttttttattagcgttttttatagcggtttgatagagattaatagaattaatgtgatttatatagatttaggtttattaagggattgtgttgattttgatgttgtttttttaagtaggtattaagagtttttaattttttttttttttttttttatgttttgggttcgttttaaggattagttttatgatggaaatttagtgtgaatttgggaatttattaaaggaaggagaggaagggtttttatcgaaaggaatggtagaaagagattaattgtattttgtataatttttagtttgttttttgaatttagttgataaagggagagatagaagaattttatataatagagttaaataataggtaggtttattgagtgagaaattggttttatttttttaggtttcgaatttgtattatagttttattttttttttagaatttattttttaattttattttatgaatagaggtttttttgattagggtttgtagtagttgataaggtcgaaatgttagagtagtcgtgattggtattagggatggatggggattagtgggtgggttttaggagtaaaataataattattaagaggtgttagagataaataaagatttttgtttcgggtttcgttttggttagataatgttttgtttataattttgttttttttatatattttttttgatattagtatttatatattatatttaagtgttggaaaatagtttcgaagtttttggggtttgggaatttaagtttgttggatagttaaattatgtggataag

SEQ ID NO: 2187 - DNA, 6200 bp, Artificial Sequence
  chemically treated genomic DNA (Homo sapiens)
attagaaaaaattaataaatataatttaagtgtattgtttttataattagaaaaaaattaataaatattataaaaatgttggatagggatattagtaataatatataaagaaaattttgttttttttaaattttttatatataaaagtagaaatgagggtagaaagagggataaaagtgtaagtgttggggtagaattaattaaggttttagttggtttttgattttttaaagggtatatattagggattatttaggttaatgtttaggaatgaaggttttaatagatttatgtttattaaaatatgtggggtttatgtggatatattatagtatatatttaatttattatgggatattttggaatatttgttttttttttttttagataagttatatggggagttgaattgtaatttaaagatgttttattaatttattacgaaaaattattattatagggaagggatatattagaagtttatatttgtatatttggtataattttatattatattaaaattataaatagaaagttgtttgaagaagagttgtttggtgaattaattatttaatggaattaagttaatgtttgatgtattttttattttagagatggttttgttagtggtattagatatataaatttattgattataatttttgtattttatttttatattagataagtattttttaaattttattatatattaaaattatttagaaggtttgataaaatagattgttgggttttaattttagagtttgatttagtaagtttgggataagggtttgagaatttgtattttaagtttttaggtaatggttaaattgtttatatttgaaaattagtagtttagttattgagattattttatggtgtgtaatatttgtgataaatatggttatagttaaatttttaaggtttgatagtattttagttttatttggatgattttgtaattttttattttaatttattatttggtgattttttagtttaattattttataattaagtttttagaaggtaatttaattatttatgaaaaatcgtgtttatatatgtatatattaatatattttttttttttttttcggttagattagaagatttagaaaaattgggttagattagaaaatttaaattaatttttattttatgttagattttagagaaaaagtttaattaagtatttagtgtaaattggtatttggggatggggttgaagagaatataaaagtataagatgtgaattttattttaaagtttataatttagtttgagtttatttgattgttttatagtttgtaaagtgtttttgtaatattatttgatttatttagagaagttaattaggtttggaatttatgttttttgatgagtagtttattagtttttttagtttattattttttttgtttaagttttatatttgaaagaaattatgtgtatttgttttaagattgtgtttaaaggatgaaattatttttttaaaaaattagttttatttttaatggtataaagaaaagaaagtatgattaattttttttttttttttcgtttttttttaaattttttttgttttgtatgaaaatttttgttattttgtaattttttaattttttgttttatattttataggttaagaggttttagttatgggaagggtggttgttttgaattgtttttttaatattgtttaatggttttttttaatggtatatatttgtttaatttttttaaaggtagttataataagtttttaaaaaataatttagtaatattgatacgaaaattttagaaaagtaagagaggtaggtaggagagtgaaaattaagtaagtaaaaaaataaagagataaaatttttagtgaaaggagaaatattgatgaaaaatgttttaaaaatatgaattaggaaaattttagtacgatatagtttttttattgatattatttatgagatatttattatagggatggagaaggttatattttagtaaatggtattatttattaattagtaatttaaattagatatttaggagttatttgttattttttttttttttttatattttatattatatttattagaaggtatttgaatttatttttatatttagaaattattatttattttttttttatatattttgttattattttaatttaaattattattattttttgtttatggtgttggattaattttttaattatgattcggtttttgtttatttttttagatttattttatataattgttttttttaaatatattttagttatattggtttttttttagatttttgaatattaatatgttaagtttttttttgttttaggacgtttgtataatttgtttattttgtttagaatgttttttttttttttttttgtatggttggattacgtttattttttaggtattagtattaattttttggaaaggtttttttagattagtttaatttatatagtttttttgtaaattttttttaattttatttataaaaggtaagttttattagaataggaatttattttgtttattattggattttagtatttagtaatttttggtatagacgaaagaagtatttaattatttgtagaataaataaataattatttggtgttttgtgatttagttttgtggggttaggaaagggtttttgatttaaaaggttttgtaaattgattaagaattagttaggttagggatagggttagaagacggtttggggtgagaaggaggatagtgtattttaggaatataaaagatattttatatggttggagcggtggaaaattattagggttgaagagttaggtaaaagttagataggaaagagtttgtaagttatgttaaagagtttgggtttaaatttgagggtaaataggagcgattgaaaggtttttaatggggagtgtttcggttaaatatgaattttattagtttagtaatgtggagattggattggaaggtagtaagattgaaagtaggagaattagttggggcggcgggggaggggggggttattgttatagttatgtagtagttatagggtcgaattaaaataatgttagtaaaaaacggagagaagtgaatagatttgagatatttaagaggttggtagggattggttggatgtgaaaaggaagaaaatttttaagttttggtttaagtatatggtttagttaaaatatgttttttttaagttattatagtattttggaagatttttttttagtacgtattattttgtatagtggtttattgaatacgtatttgtatattatagaagtaagagtcgcgtttttttttttttattttcgattttaaaagtttatttcgagtttagttcgatggtattgtaagtgtttaataaacgttcgttaggtgattgtaaaagtattgagtttaaaataaaataattgacgtttatattttgttatttttatggttgttcgtttatagagaattatttgtgaaaaaataagcgtcgggttttgggtgggttttatttataatgaagttaagagtttttttaggagttttcggtttttcggtttttcgagaatttttttatttagtttatttgggggagaagattaggaacgggtttaggcgacgtatagtgattcggatcggtcgaatttagtagtacgtcggtagttttttaatcgaatttttcgcgttttttttcgtcggaagtaacgttttggttttgattatttagagttaattagaagaaggcgtcgtagagggtggagtttagcgaggaaattttataagtatttggaaacgattattttcgttaaattgcgggtagagttttttttttcgataggtggattagtagtatagttcgtaaaattggttttggagtttcgttgagttttttgggcgtagggttttcgggaaagtgtggagtgagtcgtagcgttttggggtttggcggggtgattgaaagagggaatggaagttggatgaagagggttgagggagttttggaagttagattcggcgttgttttaggggttagtattatttacgggcggagggaggaagggggcggtggtaggaggtaggaggggggtggagcgcggagtgggttttcgggtgtcggagaagaaagggggcgttatttgaaagaagggatcgggatttggcgggatttaggggcgatgtggattcggggcgatttgtgtaatggatgggttgtgcgagtaatatagttttggggtgatttaagaacggagtattatagggagtggttaggttttagatggaggtgggtgtaaggagtatagtttttggatttggatttagcggtttgcgacgacgtgtttcgtttattgttgagtgatttagtgtaagttttcgtatttttttgagttttagtttttatatttgtagatgggaataataattatatacgacgtataagattgttgtgacgatttagttagaggagatgatgcgtgtgtttttttgtttcgtgatatattggtttgtagtgaatttttaataaattgttatggtagttgttattgtcgttacgtaggatttgcggaaggtaggaggtgtcgtaatggaattgcggtggttagggtagggtttggtggtgatgataatggtagggatattgggtgatttgaaggataggtgggtttcgggggcgttatagataaagtatgggttatagcgatgagttaggaagaggttttagtatgataagggtagatttggggtgtgatcgtaatgaaggtgagtgttaaggagtagatggtacgagaggaaagtggagtggaggcggtgttttcggggatgggggcggagtggttgtggtgatttggtttgggcggcgtttttgaggagttggttggttttgggttttttttgggaggagttgttttgcggcgggcggagttgtaggttgggtagggtttagtttgtgcgtttttgttggtttttttttcgtttttttattcgtattgtagtttttagtttgagttatgggtttgtcgagtttttttgtttttgtttttgttttttttggcgttttgggttattatagtttttcggtcggttttaagggttttcggtagtttatatttgttaattaattttatatttttttcggttgtagttaagaattattcggttttttatttttaatagaaggtaagggggagcgggggtttcgtcgttttaggtttaatcgtcgggaattttgatttttagagttcgggtaacggagtttatttcgaaatttatattttttgatgtttaggatttgttcggtttttggttaatattttttagaaggtggttttaaattttagttttgtttaaattttttttttttattattaataatttggtagtagttttggttgtatatttttgatttaggtttttttgtaattggatacgatagttattttaattttttttgtttttagagggtgttttaattcgaatttttttgatttttttttaaatttaaattattaaatgttagttttggtatttagtttgcggtgatagttattttttgttttaaggtagttttaaatataaattttaatatttttatttattagaaaatattggatagttatttattttaaaagttagttttttagaaggggttagtttagagttgattttgtagttttattattaagaattgttgatagtttttattttttataagattgaatgtatgtagtttatgtttgtaaaaggagttgtaggagtttgtggtgggggtggggattagtttttttatggtttgtaacgtgaaattagaggtttttgggtttgatgtttttgtgtttggttgtagtatgaggtatttttttataggttttgatggaaaagtatattttttgtgaaatgataagtaatttttatagtttagtatttttgaaagtttgtgtaaaaataggaaaagatttggaaaaggttgggattagaaagagtgtaagggtttgaagtttggttttaggagttagatagaatcggattttattttgttagttttgtgattttgggtaggttatagtatttttgtgagtttagttttttgattttttggggtttgtggtgatggttgaatgagagtagataacgtatttttagtagagtatttggttttaagtaggtatttatataatatgt

SEQ ID NO: 2188 - DNA, 6200 bp, Artificial Sequence
  chemically treated genomic DNA (Homo sapiens)
atatattatatgagtgtttatttgaagttagatattttgttaagagtacgttatttgtttttatttaattattattataaattttaagagattaaggaattaggtttatagaagtattgtaatttgtttaaggttatagagttagtagggtggaattcggttttatttgatttttaaagttaagttttagatttttgtattttttttaattttaattttttttaaatttttttttatttttatataggtttttagaaatgttgaattgtaaggattatttgttattttatagaggatgtatttttttattaagatttgtgggggaatgttttatgttgtagttaagtataaaggtattaagtttaaaaatttttaattttacgttatagattatagaaaggttaatttttatttttattataaatttttataattttttttataagtataggttatatatatttagttttatggggaatagggattgttaataatttttaataatagggttataaaattagttttgagttgattttttttgagaggttggtttttaggatggataattatttaatattttttaataggtaaagatattaaaatttgtatttagggttgttttggggtaaaggatgattattatcgtagattaggtattagagttggtatttaataatttgaatttgagggaaggttaagggagttcggattggggtattttttgggagtagagggagttgaagtgattgtcgtgtttaattatagaaaagtttgaattaagagtatgtagttaaaattattattaaattattggtaatgggaggagaaaatttaaatagaattgggatttgggattattttttggaagatgttagttaaaaatcgaatagattttaggtattaaggggtgtgaatttcgaggtaggtttcgttgttcgggttttgagggttagggttttcggcggttgggtttgggacggcgaagttttcgtttttttttattttttgttggaagtagagaatcgaatagtttttggttatagtcgggagggatgtggggttggttggtaagtgtaggttgtcgagggtttttaaggtcggtcggagggttatggtggtttagggcgttagaaaagatagaagtaggagtaggagggttcggtaggtttatggtttaggttggagattgtagtgcgggtgggagggcgaaaaggaggttagtagaagcgtataggttaagttttgtttagtttgtagtttcgttcgtcgtaaaatagttttttttaggggaaatttaaagttagttagttttttagagacgtcgtttaagttaggttattatagttatttcgtttttattttcgaggatatcgtttttattttatttttttttcgtgttatttgttttttagtatttatttttattgcggttatattttaagtttgtttttattatgttagggtttttttttaatttatcgttgtagtttatgttttatttatagcgttttcgaagtttatttgttttttaggttatttaatatttttattattattattattattaaattttgttttggttatcgtaattttattgcgatattttttgtttttcgtaaattttacgtaacggtaataatagttattatgataatttattgaaggtttattataggttagtgtattacgaggtagggaggtatacgtattattttttttaattaaatcgttatagtaattttgtgcgtcgtatatgattgttatttttatttatagatgtggaaattgaggtttagagaggtgcgggaatttgtattagattatttagtagtgagcggagtacgtcgtcgtagatcgttgggtttaggtttaaagattgtgttttttgtatttatttttatttggagtttaattattttttatgatatttcgtttttgggttattttaaaattgtgttgttcgtataatttatttattatataggtcgtttcgggtttatatcgtttttaaatttcgttaggtttcggtttttttttttaaataacgttttttttttttttcggtattcgaaaatttatttcgcgttttattttttttttgttttttgttatcgtttttttttttttttcgttcgtgggtagtgttagtttttaggatagcgtcgggtttggtttttaaagtttttttaattttttttatttagtttttatttttttttttagttatttcgttagattttagggcgttgcggtttattttatattttttcgggaattttacgtttaggaggtttagcgaagttttaaaattaattttacggattgtattattgatttatttgtcggggagaaagattttattcgtagtttgacgaaaatggtcgtttttagatgtttgtaggattttttcgttaagttttattttttgcggcgtttttttttgattggttttgagtaattagagttaaagcgttattttcggcggaaaaggacgcgggagattcgattggaaggttgtcggcgtgttattgagttcggtcggttcgagttattgtgcgtcgtttgggttcgtttttggtttttttttttaggtgagttgggtaaaggggttttcgggaagtcgaagagtcggagatttttaaggaggtttttaattttattatgaatgagatttatttagagttcggcgtttgtttttttataagtggttttttgtaaacgggtagttatgagggtaatagaatataaacgttagttattttattttagatttagtgtttttgtaattatttaacgaacgtttattgaatatttatagtgttatcgagttagattcggagtgagtttttagaatcggaaatagagaggaaaaggcgcgatttttgtttttgtaatgtgtaaatacgtatttagtgggttattgtgtagagtagtacgtgttgaaaggggattttttaaaatgttatgatggtttagaaggaatatattttaattgagttatgtgtttaaattagagtttgaaagttttttttttttttatatttagttagtttttattagttttttgaatattttagatttgtttattttttttcgttttttattgatattattttggttcgattttatgattgttatatagttgtgatagtaatttttttttttttcgtcgttttagttggtttttttgtttttaattttgttattttttagtttagtttttatattgttgggttgataaagtttatatttgatcgaggtattttttattgaaaattttttagtcgtttttatttgtttttaggtttaagtttaaattttttaatatgatttatagatttttttttatttgatttttgtttggttttttagttttagtggttttttatcgttttagttatatagaatgttttttgtgtttttgaagtgtattatttttttttttattttaaatcgttttttgattttgtttttgatttggttaatttttagttagtttgtaaagttttttaaattagaaatttttttttgattttataggattggattatagagtattaagtaattatttgtttattttgtagatagttaaatgtttttttcgtttgtgttaagaattgttaggtattgagatttaatgatgaataaggtagatttttgttttaatggaatttattttttatggatggaattaaggagaatttataaggaaattatgtgaattagattggtttaagaagatttttttaaggagttgatattgatgtttaaaagatgagcgtgatttaattatgtaaaagagggaaagaaaaatattttaaatagagtgaataggttgtgtaaacgttttgaggtaggaaagagtttgatatgttaatgtttaagaatttaaggaaagattagtatagttggaatatatttagaaaggatagttgtatgagatgagtttggaaagatgggtagagatcggattatggttaggaggttaatttagtattataaataggagataatggtgatttggattaagatgatggtagaatatatgagggaaaagtgaatgatggtttttaagtatggaagtagatttaagtattttttgatgagtgtgatgtgggatatgaaggaaagggaggaatgataaatgatttttaggtatttggtttgagttattggttagtgagtagtattatttattgagatgtgattttttttatttttgtaataaatgttttataaatgatattaatggaaaaattgtatcgtattaagatttttttggtttatgtttttaaagtattttttattagtatttttttttttattgaagattttgtttttttgtttttttgtttatttaatttttatttttttgtttgttttttttatttttttagaattttcgtgttaatgttattaaattattttttagggatttattatgattgtttttagaaaaattaaataagtatgtgttattggaggagattattagatagtgttaagaaaataatttaaaatagttattttttttatagttgaggttttttggtttgtaaaatatgaaatagaaaattggagaattataaggtgataaagatttttatgtaaggtaagaagggtttggagaggaacgaagaaagggagaaaaattagttatatttttttttttttatgttattagaagtggaattagttttttaaaggagtaattttattttttgggtatagttttgaagtaaatatatatagttttttttaagtgtgaagtttgagtaaagagagtaatggattagaaagattggtaagttatttattagaaggtatgagttttagatttgattaatttttttgagtggattagataatgttgtaaaagtattttgtaaattgtaaagtagttaaatgaatttaaattggattatgaattttaagataggatttatattttatatttttatgttttttttagttttatttttagatgttagtttatattaaatatttaattgaattttttttttaggatttaatatagaataagaattagtttagattttttaatttaatttagtttttttagattttttagtttagtcggaagaagaaaaaaagatgtgttggtatgtgtatgtatgggtacggttttttataaatgattaagttgttttttgagaatttgattatgaggtagttaagttgaaagattattaaataatggattagagtaaagaattgtaaaattatttaaatgagattaagatgttgttaggttttggggatttaattataattatgtttattataagtgttatatattatgagatagttttaatgattaggttattggtttttaagtgtgggtaatttggttattatttgggaatttaaaatgtagatttttaggtttttattttagatttattgaattaaattttggagttggagtttagtaatttgttttattaagttttttgggtgattttgatatatgataaagtttgagaaatatttgtttagtatgaaaatgggatgtagaggttgtaattaatgagtttatatatttggtattattgataaaattatttttagaatgaaaaatgtattaggtattagtttgattttattaaatagttgatttattaaatagtttttttttaagtaattttttgtttataattttagtataatatgaggttatattaaatatataaatatgggtttttgatatgttttttttttgtgatggtaatttttcgtggtaaattagtagaatatttttggattatagtttagttttttatatggtttgtttaaaaggagagaaagtaagtattttagaatattttatggtaaattagatatgtattatagtgtgtttatatggattttatatattttaataagtataagtttattggagtttttatttttggatattgatttaggtaatttttggtatgtgttttttgaaaaattaaaggttaattgaggttttaattagttttgttttaatatttatatttttgtttttttttttatttttatttttatttttatgtgtgagagatttaaagaaagtaagattttttttgtatattattgttaatgtttttatttagtatttttatagtatttattgatttttttttaattataaaagtaatatatttagattgtatttattgattttttttaat

SEQ ID NO: 2189 - DNA, 7403 bp, Artificial Sequence
  chemically treated genomic DNA (Homo sapiens)
ataaggtttttttaatagtttgaatttttatatttttatatattatttaaaagtttagtattatatttgtttgaattattgttggatattagagtattttattaaagaattaatttttatttatatgtttatttttttttaggttaattttaatggtaaaaagtttttttaaaaaaattatttttttggttatattgataagatatgaatgaataaataagaaaaaaaaattaagtagatatgttatagttaagatattttagataaattttaataaaaatgtattggaggataaagggtacgtaggttggatttgaagggtagtattttttttgaagagtttgttttattttttagtttgaatttttttaatataggtaaaaaaattggtagtgggggaagttaggggtaatagtgtgttagtatatgtatggttttaagagttgttataatattaaaatatttagtatagatttatttttttgattttttaagtgttttgatttttttagatttttttagttttttatataggttaatttttatagttttattattatgaaataataaaaatattaatgtttattattttagggggttttaggtattttgatttatcgttatagttttttgttttatttgatggtgtttgtgttaattagaattttaaattataaaatttaaaattatttcgggaagtaagtatggttgagagttttattttttattagataataataagagatgattaatagataggtaatagataagtagatagatagattaattgatttttagttagaagtaggtatgttttagttttattttttattagataagaaatgtgtgtgtttgtgtatatggatagaatattgaagtgtgaggaattttttataaggaaagttattatttattttatttttgattagtatatagttaaatatttaatttttttgtttaaagaaaatataatttttaaagagtgagatttacgtttgtggagattttggatatgttatttttaaatttggtattattttatattaggtattaaaatgtgtataaaggtatatatgatttagaataagtacgtgatatataatttatagagattttatagaattagattagaggatatgaatagtatagtagtaattaaaagaaaaaaataagaattataggggaaatttttaaatgtttttattatggtttttttatttaaggagtaaatgtttttaaggtattgataatagattaagaatttgtatttattgagggaaattgatgatttttaaagttttagtaaaaataaatattgaatatgaatatttttaaaaaaataaaagtatgttttattattgttaaaagaaaaaattttagataaattaattttagtagagtttaaacgagtaaagagataattaatgaatgaggtagtattttaaacgagtaatggtttagagagttttattttgtaaagtgggtaggtagtatttatagatagaaaaataaaatgataaatagaaatagtgttattgattatagttttttttttgttttatttggatatttgagtagtttgtagtttgtaattggttgaaagtttagttgttaagattggttaagatttagttatttgttataagaatatatttttaatttaggttgtagtttgtttatatattaagttagattgtagtttattgaaaatggggtagtattaggttaaatttaatttaataatatgtatgaagttaatttaaatagtaggatgtaattaagttattgtattttgtttattttaaaaatagtgttatttaaaaaaaattattattgattttttttttaatgtgttttttatattgtttaatattttatattgaaaatagtatacgttttatttaattttttagttattagaagacgattatttagaattttttaatttatagataatatttttttaattattttatattttattttatttaagataatttattattaatataaattgaaatatttttgtgatatatttattttgaggatttttttaatttttaattttttttattttttaatattttttagtatattttgtagtagatattttttaggttatgtgaagaaatttttttttgtttttttgagatggagtttttttttgttatttaggttggagtgtagtggcgtgaatttggtttattgtaatttttgttttttgggtttaagcgatttttttgttttagttttttgagtagttgggattataggcgtttgttattacgtttagttaatttttgtatttttagtagatatagggttttattatattgattagattggtgtcgaatttttgattttttgatttttttgttttagttttttaaagtgttgggattataggcgtgagttattgcgttcgttttgtgaaggattttaaatatattttgttttatacgtgatagaagaaaaaataaaattattttaaatttaaaaatagataaataaaagaaaatataaattttgttttaaattaggaataaaaattaatttgatgttatttaatgttaaaaattagcgttttttagaaaagatggtaattttgtttattagttttaggtattaaatatagtatgggaattttagtattatttgagttatttatttagttatttgatataaattaattattattttttagttgtattataagtttttagattaaaaatggtaaataaatgaagttttgtaaagttttaaaatgtataattttatttttattgaatttttttattgttttaaattaagggtatagtttgataaagagaaagtttggtaagaaagtatatataaaaattaaggtgaaagggggtaatatgtatagtagttagaagaattaggataattatgatttttgtataatatatgtttttgtattatttatatattttaatattttatttataggaaatgtggggttatggagtagtaaggagatatataataaattttatagagaaatttgtatttttttgtagttaaataaatcgattgatagattttgaataaatatagtttaggtttttttagattgtttttattttggttatttaagaatgttgtaatatttttaaattttaagattaagttgttattgttagtttttataatagatttttttatttttaagtttatgggagaggaggagaatataggataatgttaatttttttgttatatagttttgtttttttaataatttagattttttttatttagggaaaaaatgaatatttaatgtgagtatatggaattttgatttagtttttagattgagagagtttatgaattattatatttgatgtttatgatttaaaatgtaggattgttttaaattaaggtaattaggaagatagttttttagagacgttagtttttgttaagatttttaggtttttataagagtatttagttagataattgttaaagtatatatgtggttttaggaattaaggaaaaagtaaatgttataggaagattattttttaaattattttatttattagtttattgtaagagatagtaaatttgaaattaaaggttataggttgttttagatgtatggatttaaaaattagagaaagttattaataaaatttagtttttatttattatagttattttatttaggaaatttttaaaaggtgaatggaatttttaagtttatgaaagatgaatttttgttattttggttttagagtggtttagggttagagaaggtagagagattataagttaataatagtttatatattgttatttttgaaaagagtggaaattattggttagaattttagtttattatatggtatattagaatgatgggtgtaagtgtgtttgtgtgtgtgtatatatatgtgtgtttgttttggaaaattattgtattatttttttaaaataaatttttaaattaggggttatagtttgtttgttttagaagtgggtttataggatgtttataagagaatttattttttagttttttttatatgatttttgatttttcgtgaagtaataattgtttttttatttaatttaattatagaattattaggttggtgcgtaagtgattgtagtttttattatttaaaagtaaagtttaaaattttaattatttttgtattgaattattttttttatattttttatttttagtttttttaagtttttgtttttttatttgtaaattggagagaataatattatttaatatatatgttaaaattaaaagaaataaatagatgaagatgtatatttaaagtattatatagatacgttatttttaaaaagataaaatatatgtatttttaaaaagataaaataaaatgtgtattttaaaaagataaaataaaatgtaaaaagtaataaaatgaaggaaatttaatgatagtgtaataggggattgaaaattttgattttttaatttttattttatattttttggtatttagtgtaaaaattttaaaatttttatttagtaattttgaggaagaaatttgataattgataatatatgagattgttatttaagtgaaatataattttatatatttaataaattttagagaaataagataaattttaaagtaaatgatttttgtagttttatagattttttaaattaatttagttttagattttatttttattattttttttatttttttttggtttaattaattaaaattttttttagaatgtttatttttggttagtatgtttttttgaatatgaataagaaataaaatattatttgatgtttgaaattatgggggtaattttaatgacggaaatagatgattaggaaaagggaaacgaatgtttgatttattatatttatgaagatattaaaggtttataaagttaatatttgggaaagagaaaatcgtgagatttttagattttttttggtgaagtgtgttttttgtaacgattacgaatatgaatattaaaggatcgttatggaaaggtatgtgtgataatttattgcgttgttggttgtattaatatttttgtggggggattaatgtgaaattttaattaataataagagtttgtaggtttataaggtttagaagtataattttatgttttttttagaaagtaattttataagggtattatagaatagaataatggtttttaaataggggaatttttttttagaggtatttggtaatgtcgggagatgttttgggttgttttaattgaggtggggaagtgagggaaaagtgttattggtatttaatggatagtgatgagagatgttattgaatattttttaatgtacgggatagtttttagaataaggaattatttaatttaaaatgttaataatattaagattgagaaattttggattagaataagatttaaagagtttgtgggtttaatttgttataatttttaaagggataaagtaatattttttggttattaggtttttaatgtggattggttaatttgaattaatttgatgaaatttttaattgtgaagttataaaatagatattaataatagaattgttttttttattttttgttaatttggtttaagttaaatgatattttaaaaggaaaaatagattgtttagtaataattaattatttttatttttttggttgatatttgtaaggaaaataaattagtaataattataaaatgtgtttttaattaaatgaagaataaaaatatgtgtttattttatttcgttttgggttttaaaaattttttttatgttaaatgtgtagataaatgtatttagagttatagaatatttatttagttgtgaattttttagatttgttattttaatttttttatttataaagtatattttatttatatatatagataaaatatatatttggtttcgttatatgattatagtatgtataaaataaattttttggaagaattatgtttttgaaaaattaaaagtttataataggaattattttaaataaaaattttattttataattaatagatttagttattttttatattaagtaattttttaggtatttttaagtgtttaggtttaggtatttttttataaattaaattttagtatttgtttagttttattttgggtatttttgattgtattttttaaaggttttgaaggatttaagttttgtgataaatatagttttatattgggtatttttttggggtaatgttattgaagttaataagtgattttaatttggtagttatttatcgtttttttttttttgaaagtataaattattgatatatataggattgtaattgtttatttgttgagatagtaaattgatgataaagttttgaaaatttttagtaaagattagagtgttttgtaattagagtaggaaaagtggagaaaattaagttttttggggtttttgttgtgatgtaattaattaaaggtaaagaatttgttattttttaaaagtgatagtaataatttatgtaaatattgagttattacggttatttatgcggtttttattatatagatgtagattgatagtttataggtgtacgcgatgtgataagacgacgtgtaaagattatagtattggtattatgttttttttatttattaatgatacgatttggggaaaattatttaatttttttaagttatttgttttattagtataatttgatgataattataaaggtttagtgtattttataaggttattatgaagtttaaatataaaaaaaatttaatgtttttggcgaagtgttaaatatatgtatgggattattacgagttagtagatttaaattatagtattatttttatgttagaattttttttaaatttagtattagtaattaaataatcgtgtgtttatttttattaggtaggatgataaatcgaaaggatcgattgtattgtttttgttatattagtgtttataatgtaaattattagatatatttagttaaaaaaaaaattataaagtgttgggtagtttgattgttgaaaatttgtagaaatttttaagatattaaattattttaagagaatgatttaaatattttagtttagaattaatttaagttttaaatgtttggaaagtatagaagtatttttgggaaacgtataaaaatgtaggaggtaatttattttttaaattatatatttgtgtaaatataattatatatttatatttatatagtggaaggcgtttgttttttttttattttagttattatagtagtaaattaggtagttgagggtagtggggagtaataaggtttttttcggtaggattatttttgaaaattttcgtggaataaattattttagagtggttcgcgtttttatttaagtagg

SEQ ID NO: 2190 - DNA, 7403 bp, Artificial Sequence
  chemically treated genomic DNA (Homo sapiens)
tttgtttaaataagaacgcgagttattttgagatgatttattttacggaggtttttagaagtaattttgtcgaggaaagttttattgttttttattgtttttagttgtttgatttgttattgtaatggttgggatgggggaagaataaacgttttttattgtgtaaatgtagatatataattatgtttgtatagatatatagtttgagaagtgggttattttttgtatttttgtacgttttttagaagtgtttttgtattttttaaatatttggagtttaaattaattttgagttagggtgtttggattatttttttaagatagtttaatgttttgggagtttttgtagatttttagtagttaggttgtttagtattttgtaattttttttttaattaggtgtgtttgataatttatattgtagatattgatataataaaaatagtatagtcgattttttcgatttattattttgtttgataagaataaatatacgattgtttgattgttaatattgagtttgaaaagaattttaatataaaaataatgttgtagtttagatttgttaattcgtaatagttttatgtatgtgtttgatatttcgttaaaaatattaaattttttttatatttgagttttataataattttgtgagatatattgggtttttgtaattattattaaattatattgatgaaatagatggtttagggaggttaagtgattttttttaagtcgtattattagtgggtgagagaggtatgatgttaatattgtggtttttgtacgtcgttttgttatatcgcgtatatttgtgggttgttaatttgtatttgtgtaatgggggtcgtatgagtagtcgtgatggtttagtgtttatataggttgttgttgttatttttaaagaataataagttttttgtttttgattgattatattataatagaggttttagaaagtttgattttttttattttttttgttttaattataaaatattttgatttttgttgaaggtttttaaagttttgttattaatttgttattttagtaaatggatagttatagttttatatatattaataatttatatttttaaaaggaaagaaacgatagatagttattaaattaaaattatttgttaattttagtggtattattttaaaagaatgtttaatataaaattgtgtttattataaaatttaagttttttaaaatttttaagaaatgtaattagaaatgtttaagataaaattaggtaaatgttaaagtttagtttgtgaaaaagtatttaaatttaaatatttaaaaatatttaaaaaattgtttagtgtaggaagtgattaaatttgttagttgtaaaataaaatttttgtttgagatgatttttattatagatttttaattttttaaaaatatgatttttttaaaaagtttattttatgtatattataattatatgacgaaattaaatgtatattttatttgtatgtgtaaataaaatgtgttttgtagatagaggaattggaatagtaggtttaggaaatttataattggatagatgttttgtaattttgagtatatttatttgtatatttagtatggaaaggatttttaaagtttaaaacgagataaaatagatatatgtttttgttttttatttaattagaaatatattttatggttgttattaatttattttttttgtaaatgttaattaagaaagtaaaggtgattagttattattaggtagtttgtttttttttttgaaatgttatttggtttgaattaaattgataaagaataggaaagataattttgttgttagtgtttattttatggttttataattgaaagttttattaggttgatttaagttggttaatttatattagaggtttgataattagaaaatgttattttgtttttttgagagttgtggtaaattggatttatagattttttgagttttattttagtttagagttttttaattttgatattattggtattttgagttgaataattttttgttttgggggttgtttcgtgtattgaaggatgtttagtagtattttttattattatttattagatattaatagtattttttttttatttttttattttagttaagataatttaaaatatttttcgatattgttaaatgtttttgagagaggatttttttgtttgagaattattgttttgttttatggtgtttttgtaaaattgttttttagaggaaatataagattgtgtttttaaattttgtaaatttgtaagtttttgttattagttaaaattttatattaatttttttataggagtgttgatataattaataacgtagtgagttgttatatatatttttttatggcgattttttgatgtttatgttcgtgatcgttgtaggaaatatattttattagagaagatttggaagttttacggtttttttttttttagatattggttttataaatttttgatatttttatgaatataatgaattaggtattcgtttttttttttttggttatttattttcgttattgagattatttttataattttaaatattaaatggtattttattttttatttatatttaggaagatatattggttagaaatgaatattttaggaaggattttgattaattaggttaaaaggaaatgagagaaatgatgaaggtgagatttgagattagattggtttggaggatttataaaattatagaagttatttattttaaaatttattttatttttttaaagtttgttgaatatataggattatattttatttaggtaataattttatgtattattagttattaagttttttttttaagattgttaggtaaagattttaaaatttttatattaaatattaagagatatagaataaggattgagaaattaggatttttagttttttgttatattgttattaaattttttttattttgttgttttttatattttgttttatttttttgaaatatatattttgttttgtttttttaaaaatatatgtgttttgtttttttaaaaatagcgtatttgtatggtattttgaatgtatatttttatttgtttattttttttgattttaatatatgtgttaagtggtattattttttttagtttatagatgaagaaatagaagtttggagagattaaaggtaaagaatatgaaagaagtagtttagtgtaaaagtaattgaggttttgggttttatttttaaatggtaaaaattgtagttatttgcgtattagtttaataattttatagttgagttaaatgaaggaataattattattttacggaaaattaggagttatatgaggaaggttgggaaatgaatttttttgtaaatattttgtggatttatttttaagataaataagttataatttttgatttaagagtttattttggggaagtgatgtagtagttttttagggtaaatatatatgtgtgtgtatatatatagatatatttatatttattattttggtatattatgtaataaattgaaattttagttagtaatttttattttttttaaggatagtagtgtgtaaattgttattaatttatgatttttttattttttttgattttgagttattttgaggttaaggtgataaaaatttattttttatgggtttaaaaattttatttattttttggaaattttttaaatgaaatgattataatgaataagaattaagttttattgatgattttttttaatttttaagtttatgtatttaaagtagtttgtgatttttagttttaaatttgttgttttttataatagattgatgaatgaggtaatttaaaaaatagtttttttatggtatttattttttttttagtttttagagttatatatgtgttttagtaattatttgattaagtgtttttatggggatttagaaattttaataaagattaacgtttttgaaaaattatttttttaattgttttagtttaaggtaattttatattttgaattataaatattaaatgtgatgatttatagatttttttaatttgaaagttgggttaggattttatatatttatattaggtatttattttttttttggatggagagagtttgaattattaagaaagtagagttgtgtggtagagaaattaatattattttatatttttttttttttttataaatttaagagtaagaaaatttgttataagaattgataatgataatttaattttaaaatttaaaggtgttgtaatatttttggatagttaggataagagtaatttaagaaaatttaagttgtgtttatttagggtttgttagtcgatttatttgattgtaaagaggtataggtttttttgtaaaatttattgtgtgtttttttgttgttttatagttttatattttttgtgaatggaatattgaaatatataaataatgtaaagatatatattatgtaaaaattatagttgttttaatttttttaattgttatgtatgttatttttttttattttaatttttatatgtgtttttttgttaggttttttttttattaaattgtgtttttaatttaaaataataaagaagtttagtaagaatagggttgtatattttaaaattttataaaattttatttgtttgttatttttggtttgagagtttgtgatgtaattgaggggtgatgattgatttatgttaagtagttgaataaatagtttaaatgatgttaaagtttttatgttatgtttagtatttgaaattaataaataaggttgttattttttttaaagaacgttagtttttaatattaagtaatattaggttggtttttatttttaatttagaataaagtttgtatttttttttgtttatttgtttttaagtttggaataattttgtttttttttttgttacgtatgaagtaaagtatatttaaaattttttatagggcgggcgtagtggtttacgtttgtaattttagtattttgggaggttgaggtaggaggattaagagattaggagttcgatattagtttgattaatatggtgaaattttgtatttattaaaaatataaaaattagttaggcgtggtggtaggcgtttgtagttttagttatttaggaggttgaggtaggagaatcgtttgaatttaggaggtagaggttgtagtgagttaagtttacgttattgtattttagtttgggtgatagagggagattttattttaaaaaaataaaaaaaaatttttttatataatttaggaggtgtttattgtaaaatatgttaagggatattaaagagtgaaagaaattaagagttaaaaaaatttttagaatgaatgtattataaagatattttaatttatattagtagtgaattgttttaaataaaatgaaatatgaaatgattaaaggagtattgtttatgaattgaaaaattttgaatagtcgttttttaatgattaaaaaattaaataggacgtgtgttgtttttaatataaaatattagataatgtaaagggtatattggagaagagattaatagtggttttttttgaatggtattatttttagaataagtaaaatgtaatgatttaattatattttattatttagattaattttatatatattgttgaattgaatttggtttaatgttgttttatttttagtaaattgtaatttaatttagtatgtaaataaattgtaatttaaattaagaatatatttttgtaataagtagttgagttttggttaattttagtagttgagtttttagttagttataggttataaattgtttagatgtttaaataaggtaaagaaggagttgtaattaatgatattatttttgtttgttattttatttttttgtttgtaaatattgtttgtttattttgtagagtggagttttttaaattattattcgtttagggtgttgttttatttattaattgtttttttgttcgtttaaattttgttaaaattaatttatttaaagtttttttttttaataataataagatatgtttttgtttttttggaagtgtttatgtttagtgtttgtttttgttagggttttggaggttattagttttttttagtgaatgtaagtttttaatttgttgttagtgttttgagggtatttattttttaaataagaaaattatagtggaagtatttggaaattttttttgtaatttttattttttttttttaattattgttatattatttatattttttggtttagttttatgaagtttttatgaattgtatgttacgtgtttgttttgaattatgtgtgtttttgtatatattttaatgtttgatataaaataatgttagatttaaggatgatatgtttagagtttttataaacgtaaattttattttttgagagttatgttttttttaggtaaaagaattaaatatttagttgtatgttaattagaagtgagatggatgataattttttttgtgaaaggttttttatattttaatattttgtttatgtgtataggtatatatattttttatttgatggaaagtagagttgaagtatgtttatttttagttagggattaattggtttatttatttatttatttattatttatttgttaattattttttattgttatttaataggaaatgggatttttagttatgtttatttttcgggataattttaaattttataatttaaaattttaattagtataggtattattaaatagaatagaaagttatagcgatagattagggtgtttgaggttttttgaaatgataggtattgatgtttttattgttttatagtggtgagattgtaggggttgatttatgtgaggggttgggggagtttagaggaattagggtatttggaaagttagggaagtgagtttgtattaagtattttgatattgtaataatttttagggttatgtatgtgttgatatattattatttttaattttttttattgttaatttttttgtttgtattgaaaagatttagattgaaaagtagagtaggttttttagagaaaatgttattttttaaatttagtttacgtattttttattttttaatatatttttgttagaatttgtttaaaatattttagttgtgatatatttgtttagttttttttttttatttatttatttatgttttattagtataattaaagggatgatttttttaggaaagttttttattattggggttgatttagaagaaaatggatatataaataagaattaattttttgatggaatgttttgatgtttaatagtaatttaaataagtataatattaggtttttaaatgatatatgggaatgtaaaagtttaagttgttgaagaagttttat

SEQ ID NO: 2191 - DNA, 6077 bp, Artificial Sequence
  chemically treated genomic DNA (Homo sapiens)
tttgtgtgcgttgaattatttttgttgtagatttagaaggaaattatgaaagttttaagtttatttgtagatggttggtttttttttatttaggtgttaatttaaatgttatttttttaaagagattttttttgattattttacgtaatagtattttagtagttatgttatattatattattattttattttattttagtaatatgtatttattatttattgaaagtgatgtatgtgtattttatttttatatttttttatatgtgtataaatgtatgtatatgtatatatgaatgtattgaaaataagaattttttttgtttttttcgttgttgtttttaaatagtttagaagaatttttggaatattattttaggaatttaataaatatttgtgagtaaataaatatattttaaagataagaggaaaatttatatagttgtagtggatttttttggtggaaaattttataaaggtatttgagtttagataatgtaagtttataagaaaattaattagattattttaataggaaaggaataagtattttaaattttatattttttatttttgttttaaatttatgttttagttgcggggaggatataaaaagattaaaggatataaaattatagttagataggaggaataagttttagtgttttatagaattgtaggaggattatagataataagtattgtatttgaatagaaaggtttatatgttatgtgttaatttcgttttgttgttttatttaagattgggaaatggaatagatgatatgggttttatagagaggtaaagtgtagaatttgtttaaatatagtggttttggggtggaaagtttttaattggaattgtgttggtgtttgtgtggatggagtatttaattttgagttttaggagttttttgaaggtttttttggttaagatgattttgaggaaatgattgatttattggttgttttttaaatggatgatatagtttagatttttataaattatatgagtagaaggaatttagttgattggatttattattaaatttagtttgtgagttttagtttagagttagtataatttagaaaaataaatgtatatattatatattaaattttgagtattatgaaatagattttagatgttataataataagaatttatatgggtgttttttttgtattttgttttggtttttttttgttttttgtttaagggagtttggatttatttaagtagttttaataggttaaataagagagtggttaaggagtggttgaaatgtgaatagaaagatttattattatattagagtaattaatttatttttaaaatattgtgggtttagtgttaagtgttagaggtttttttatttatttatatatggaagtttgaagaataaatagaattataaatttttttttgggtataaaatttgtatgttttttacggttttaaggtggggagtagttgggtaggtagaaggaggggtaagaggtagttaagaggaggggcgggaggtaggcggggaggaatgggttatttcgtttagttgattagttttgattagtttatgttttgggattttattttataagttagattttttcgagttatatagagtattttttttattttttagatttaatgatttttgggatgatatagtaacgaaaataattttttattggataaagaaattgtgttgtgcgggagataagtagtttagaaaaaaaaatggatgaggagaggagttgggagtttgggggtaagatagtttaaaatttgatagtttggttggggaacgataaaagatattggaatttaaggaggagattagtaagaatgtaggagaaagatttggtgggatttggagaagaaagtgttaaaaaataaaattggaatatgatagtttgtagattattaggtttgaaagacgtaattttgtagtaatatgaaggggaataaattttgtttgaatagggaagtttttagtatgatttttgttttttttagataagtaattttggagaagatatttgatttttgagttttagattgtttatttgtaaaaaggagagaataatatttgttgtttattattttagtgaggttgtattaaggattagtttagaggaggtaaagtagaatgttttattgtatagtatggaggttttagagtcggattattatatttatattttatttttaaaattttttggttgtttggttttgagtaagttattttatttttagaaagtttatttgattatttgtaaaatgggtaagtttataggtggttgtgatgataaaatgaaaaaaaattttttaatttatatgagttatatgttgtagagtaagttatgtggtatatagtaagtatatagaaaagatttattgttattaaaattaaaggaaagtggtttagtgtgttaagtattaaatataagttagagagatgttttgagaagtagataaagaaatttataatttagaatgaatagtaataagaatgatatgttttttaaattgagtttgggtagttggatttgaatttattttatatatttgagtttatagtatgaggtaatagtttttatttatagttattttttttgtttgtaaggttatttttttttgaagaaagttgattttagattattttgcgattatttaaggaagagcgtaaaatattggagaaggttagtttttaagttttagatatagaaaatttttaaatttttgggtgtttttttttagattgagagttagagttataagtattgatttaaaaatttttttttttaaaaaaattttttattttttattaaggtttatttttttgtttagtgtatattagtatttatagttgttagagtaggagtttttttttattttttaaggtaggtgttttgtgaagattttatgataagggataaaatgaaataatatgtttagggataataaaggaaaagtttattttattaatgttttaaaatttggttattttaggtttggtaagttattcgtgagtagagaagtttgttatttatatggtagttatggtttggatgggtttcgaattgtggtatggtaatgttttgagattaggtgttaggagaaagataaatttaattatttatttttattaggaagaaaagtattaggaaggaattagatgtatagtttgttttttggggatttttgttttgatttttaataaatttttttttagatatttttttttagatgaaatttttatattttataatgttttttatggtttttgttggttttatggttagttttgttaagatttgtatttttgggtaagatagaatttttttgaattttagttttttgttttataaatggaaataattttgttttgtataaattataattagtatgtttgtgggaagttaaagtgtgaaatttagtataaatgaaaagtaatgtattattgttgtttatatgaaaatttttgtaaagttgttaggtattgtgtattatttaagtatagtagtgttaggtatgggtttattagtgattagagggggtgcgaggcggagagggggtttttaagtagtgggttttttggttgtggggaagttggtttagcggttatattaggagttgaaatcgaaggtattttgtgtgtttttttaatattatgggttttattttggtattatttttaattttttttggtttttatttgttttttttttttagttttttggttaggttcgattttaatattaagtttttgagttttttttattttgtttatcgtttttagaatatttttgttttttttattttttaaagaatttaaatttgaattttatttatttttgtttattattagtttgagtttagagttgttgagaagggaaagtatttttataaggaagttttttttttttttatattattagatttgagtatagatagtatttttatttttatattgttttggttaggttgtgttttagttaattatataattgtgttttagtagttttggtagggtttaaattaggatattttttaggaagatttattttgtattgagttaagtataattttattgtatcgaaaatagaaaatgattatttgattattttggtttagattgttagttttgagtaggtgggttagtttgtattatttgagtgtagattgtaaggataatagtgaggttgtataaaaagaatttatgataggatgtatatgagagagataaatgtttttatattgaagaaggggaggagtgcgttattggttttttattttttagaggtattgagaaagtttttatagaaattgtgttttttttttttttgaaatattttttatttttaagttttggtaggaaggagagaaatttggaagtttagaattttatggaatgttgagttttttttttttttattttttagtgttggaatttttattttttaaaattttgtatttgatttttttgtatattgattggagagaagtatttttatatttataggaatgagttttagataagattttgttttttttatgtgggttttaggaaattgaaatttaagttttttattaacgtttgtttttttttaagtatattaaatatatttttaataggtggaaagatttgtaaatagttaggttattttttttttttttaatttttatttttagggtttaagaaagtttagttttgttatttggggtttgattttttttgttttttttattttagtatttttgtaggaaatagtcggtttcgttttttgtttttagaaggtaagtttttttattatttgtgaattataaatttagagagtggttaaatatagttaggttgatgtaagattttgggaagaggaaagttgtaggtgtgtttgtgttgggaggagtggtgatttttattttatagttattttttttttggattttcgtgaggtataaagacgagttttttattattagttaggtatattttattattatgaatttatttttgatttttatttttgtggtagttgttcgtgagtattatgttttgttttaggttttaattattttttcgtttttggtcgataaatgtttttttatttttattatttttttttttttgattgtgttttgatatttcgttttttttatttggtatattttttttttattttttttgggttttttttaagttttatttgtttattttttttttgattttatttttattattgttatttatttatattcgagttgtggttggagaagttgggaagggggttaggtggggttgttttacgaaatgaagtagtaggttttaggtttggtttcgatagtaatagaatagtattattatagttgtttttaatttcgaatgtatttggggaggttgaaaaattatttatgttagagatttagttttagaaattttaattttaattgtttggggtagagtttgtgttttgggtttttaagttttttaggtgatttttaatatttttagttatgtagttaaggttaagaattgttgttttattggttaataataaagtttatttttgttttgttaaagtgagtttgggggttgtttttaattttgttttgattgtatagatttgagttatgggggaaggtggttatggttaggtttatgtagatagggggtttttttagtttggtaaaagaattttgataatttagggtttaaatagttaggggaagtatataggtgatgaataaaagagagaagtatttagtgggagagataattatattttaatttttattttattggaagtattgtgaggatattttttgcgattttagtttggtgattttaggagagttcggatttttcgtagggtatttagttatgtgttttgtaggtatagagatttgggagttataggtagtgatgattattaggggtggtagagtttttttttttgtttagttttattgtgtttgttaaggatttttaattagtagaaagtaattataggttgggagcgttatttttaatatgttattgatttgttttttttttttttatttttattttagt

SEQ ID NO: 2192 - DNA, 6077 bp, Artificial Sequence
  chemically treated genomic DNA (Homo sapiens)
attggagtggagatgggaagggagaaggtaagttaatagtatgttaggggtggcgtttttagtttgtgattgttttttgttaattagaaatttttaataagtatagtgaggttaggtaagggagggagttttgttatttttggtgattattattgtttgtggtttttaagtttttgtgtttgtagggtatatagttaggtattttgcggaggattcgagtttttttggggttattaggttgaagtcgtaaggaatgtttttataatgtttttagtgggataggagttgggatgtggttgttttttttattgagtgttttttttttttatttattatttgtgtattttttttggttatttgggttttggattgttaggatttttttgttaagttaggaaaattttttgtttgtatagatttggttatgattatttttttttatagtttagatttgtgtagttagggtagagttgagggtagtttttaggtttattttggtagaataaaggtagattttgttattggttaataggatagtaatttttaattttggttgtatggttggaaatattaaaaattatttgggaagtttaaaagtttagaatataagttttattttagataattgaagttagaatttttagagttgagtttttggtatgagtaattttttaatttttttaggtgtattcgaggttaggagtagttatagtggtgttattttgttgttgtcggagttaagtttgaagtttgttgttttatttcgtgggatagttttatttggttttttttttagtttttttaattataattcggatatggatgaatgatagtggtgggagtgaagttaaggagaaggtgaataggtgagatttaaaaagagtttaaggaggatgggaaggagatatgttagatggaggaaacggaatattagagtatagttaaaagaggagaggtggtaagaatggaagggtatttgtcggttaggaacgggggggtggttggggtttgaggtagggtatgatatttacgagtagttgttataaaggtaaggattaggagtggatttatggtggtagagtgtgtttgattggtggtggaggattcgtttttatattttacgaggatttagagaggaggtgattgtgaggtgagggttattattttttttagtataaatatatttgtagtttttttttttttagggttttgtattagtttggttatgtttggttattttttgggtttgtgatttataggtgataaggaaatttgttttttgagagtagagagcgagatcggttgttttttgtaaggatattgggatggggaagatagggaaagttaagttttagataatagagttgggtttttttaggttttggagatgagggttagaaggagggagaatggtttagttgtttataaatttttttatttattgggaatgtatttaatgtatttaaggaagggtaagcgttggtaaaaagtttggattttagttttttggggtttatatgagaggagtaaagttttatttaaggtttatttttgtgaatatgaagatgtttttttttagttagtgtgtaggaaggttaaatgtaagattttggggaatgaaaattttaatattaaggggtaaggagaagggagatttagtattttataggattttgggtttttagattttttttttttttattaaggtttaaggatgggaagtgttttaaagaaggagggggtatagtttttgtaggagtttttttagtgtttttggaggatggaaaattaatggcgtatttttttttttttttaatgtgaagatatttgttttttttatgtgtattttgttataggttttttttatgtagttttattgttgtttttgtaatttgtatttaggtgatgtaaattgatttatttgtttagggttgatagtttgaattagaatgattagatgattattttttattttcgatgtagtgagattatgtttggtttagtataaagtgaatttttttagagaatattttgatttgggttttattaaggttattaagatatagttgtgtaattgattgaggtataatttggttagagtagtgtggaaatggagatgttgtttgtgtttaagtttaatgatgtagggaaaggaggagtttttttatgagggtgttttttttttttagtaattttgagtttaggttggtgatgggtaggagtaagtagagtttaagtttggattttttgaaaggtaaaagaagtagaaatgttttagagacggtggataaaatgggaaaagtttagaaatttggtgttgaaatcggatttggttagggggttagagggaggaagtaaatggaaattagagggaattggaaataatgttaaagtggggtttatggtgttgagaggatatatagagtattttcggttttagtttttggtatggtcgttgagttagtttttttatagttaggagatttattgtttggagatttttttttcgtttcgtattttttttaattattaatgggtttatatttaatattgttatgtttagatggtgtatagtgtttgataattttataagagtttttatgtaagtaatagtggtatattattttttatttatgttgagttttatattttaattttttataaatatgttaattgtaatttgtgtagagtaaaattgtttttatttatagagtaagagattgagatttagaaggattttgttttgtttaagaatatagattttggtagagttgattataaggttaatagaagttatggagagtattgtgaagtgtgggaattttatttaagaggaggtatttaaaaggagatttattgaggattaaggtagaggtttttagaggataaattgtatatttgatttttttttggtgtttttttttttggtagaaatggatgattgaatttattttttttttggtatttagttttagagtattattatgttatagttcgagatttatttaggttatgattgttatgtagatgataaatttttttgtttacgaataatttgttaagtttgaggtagttaggttttggagtattgataaaatgggttttttttttgttgtttttgaatatgttgttttattttgttttttgttatggggtttttatagaatatttgttttagaggataaggagagatttttgttttaataattgtagatattagtgtgtattaaatagggaggtgaattttggtagaagatggaaaatttttttggaaaaggggatttttggattagtgtttgtggttttgatttttagtttgaaagggaatatttaagaatttgaggattttttgtatttagagtttgaagattagttttttttagtattttgcgtttttttttaaatgatcgtaaaatagtttgaggttagttttttttagaaaggaatgattttataggtagagaagatagttataggtggagattgttattttatattgtagatttagatgtgtaggataggtttagatttagttgtttaagtttaatttggaggatatgttatttttgttattgtttattttgaattgtagatttttttgtttattttttaagatatttttttggtttgtatttagtgtttagtatattaaattatttttttttaattttgataatagtgagttttttttgtgtgtttattatatattatataatttattttatagtatgtaatttatgtaagttaaaaagtttttttttattttattattataattatttatgggtttgtttattttatagatgattaaatgaattttttggaggtgaagtggtttgtttaaggttaaatagttaggaggttttaaagatgggatgtaagtatggtggttcgattttagggtttttatgttgtgtaatagggtattttgttttgttttttttgagttgatttttagtgtagttttattgaggtggtaggtagtagatattgtttttttttttttatagatgaataatttaaagtttagaggttaagtgttttttttagggttatttgtttaaggaaagtagagattatattagaaatttttttatttagataaagtttgtttttttttatgttgttatagagttgcgttttttagatttagtagtttgtaaattgttatattttaattttattttttaatatttttttttttaaattttattagattttttttttatatttttattgattttttttttgggttttagtattttttatcgttttttaattagattgttagattttaggttgttttatttttaaatttttagtttttttttttatttatttttttttttaagttatttatttttcgtatagtataatttttttatttaataaggaattattttcgttattatattattttaggaattattgaatttggagagtgaagggagtgttttgtgtgattcggaaaagtttgatttgtaagatggagttttagagtatgaattggttaaggttgattagttaaacggagtagtttattttttttcgtttgtttttcgtttttttttttgattgttttttgtttttttttttgtttgtttagttgttttttattttgaagtcgtggaagatatgtaagttttatgtttagagggaagtttatagttttgtttattttttaggtttttatgtatgggtaaatggggaagtttttagtatttgatattaaatttatagtattttaaggatagattgattgttttaatataatggtgagtttttttgtttatattttagttattttttgattatttttttgtttggtttattagagttgtttaagtgagtttaggtttttttagataagaagtagaagaaagttaggatagagtgtaggagaaatatttatgtaggtttttattattgtaatatttaggatttgttttatgatatttagagtttaatatatgatgtatgtatttatttttttaaattatgttagttttagattgaggtttataagttaggtttggtgataaatttagttaattgggttttttttatttatgtagtttataaaagtttagattgtgttatttatttggaaggtagttaatgggttagttatttttttaagattattttggttaggagggtttttaaaaggtttttaaggtttagaattgaatgttttatttatataggtattaatataattttaattgagaattttttattttagggttattgtgtttgagtaggttttgtattttgtttttttatagaatttatattatttgttttattttttagttttgggtaaggtagtagaacggggttggtatatgatatatggatttttttatttaaatataatgtttgttatttgtagtttttttatagttttgtaaaatattggaatttattttttttatttagttgtaattttgtgttttttaatttttttgtatttttttcgtaattaaaatataaatttaaaataagaataaaaaatataaagtttgaagtgtttattttttttttgttagaataatttagttaatttttttatgggtttatattatttaaatttaaatgtttttgtagagttttttattagggaaatttattgtagttgtataaattttttttttatttttgaaatgtatttatttatttataaatatttattgaatttttggagtgatattttaagagtttttttaggttatttggaagtagtaacgaagaagatagaaaaggtttttgtttttagtgtatttatgtgtgtatgtgtatgtatttatgtatatatgaggaggtatagaaatgggatgtatatatattatttttagtaaatgatgagtatatattattaaaataggataaagtgataatataatatggtatgattgttgaagtgttgttacgtagagtggttaggaaaggtttttttggggaggtggtatttaagttaatatttgaataaaaaagaattagttatttgtaggtagatttagggtttttatgatttttttttgagtttgtaatagaaataatttaacgtatataaa

SEQ ID NO: 2193 - DNA, 10377 bp, Artificial Sequence
  chemically treated genomic DNA (Homo sapiens)
  unsure 38, 49: n is a or g or c or t
gatttagcgttgttgaattcgtagttcggttttgaggntattttttagnaaatttagttattattattattatttttatggttaattttagtttggttttgagtaggtaaagaggaggaggaagggaattttttatgtaatttttttgtttaggtagggagtagaagcgagggttaataaagaattagtattgagtttttattgaatgttggggatgtttatagggattattttattttatttttataataatttttgtaagagtggtattattaattacgtttttataggtgggggaattgaggtttataaagggtagtttgttgtttaaggttatattgagaggttaggtggggtggaggattgggatttgaagagatattggattgagtttagagtttttttgtttgattgagaagttgtttatataggtggggtcgggtggggttgggtttatgagtgatttaggtaagagttagttttggttttttaaatagtgggtggggtttagtaggagtgagatttttttaggagtattataatttaggttgtagttagggtgagtaggagggtacgtgattggtgtggataatggggagggggttatgtagagagaaattttattttttgttattagtggggtatagggaaggaggtttttgttgttttagttgggaagggtttagggtttggggtgaagttgggtttgtgggatagttgggggtgttggtttatgggataagttggagaaggtagggaaattgaggtaggtagtgatatttttggtggtcgttatagtagatgggtggttggtagttatttcgatgaggttggtgttggatttggtttgtttttttaatgtatttattatttttttagatatttatttatttttttgtttaagtaataaatattttttggatgttttttattcgttagattttatgtttggttttggggttataagagtgattaggatttttatagttttataatgtttgggggtagagggataatgtgattaggagtggtattgttgtggttagggaaggtataggggttttttagaggagagaagggggaggaggaggtatgttagaggaggtttattaggggatatgggaggtggatttgttttataagtggaagtttataattttgaggattaggatggtgatattagttttaggtatttagattatagttttgtagtagggagtaggaaaaggtggttttgtgttgtggttttttttttagggttggggtaagggttattttagattttttttttgtgtatttagttgtatgttggggcggttgggggtgttggtttatgggttaagttggagaaggtagggaaggtttgattttttttattttttgaagtggattaaatataagaagtttaaatttaaattttatttatttatgttagttttttttttttggatattattattagtattgagttagaaggttaggtgtttttagtatttttttttttttaagttttagtgttaatcggttattaagttttggtatttttgttattattttttttatttattttttttttattttatgtttttggttttgttttatttttggagggttgtttcggtattttgtttgtttttttagattttatttttttttgtattgtagttgtgttgagatttgtggtgttggttatagagtttggttgtagtgagggtttaattgttttatgttggaattggattagtttttagagattatttgatttgtttattttgttgtttaaatggggaaatagaggtttagtgaggtttagcggtttgtttaaggttacgttatggaagaagtgatttgaatttatttttgattttgaggtgaaggttttttttattagtgttagggttatataagtgttttttgttttgagtgtagatgggtggtttggaagttagtaggaggtataggtgtggtgatttgatgggtttagggtttaaagggagggagggtttgggagtggaagatggaattttatttaagttcgttttttttttttttttattagaaattttttttttttttggataattggatttttatatttttattttgtttttattttttttgttgataattttatttttttgttttgtaaatgttagggggtttttgatttggggaggaagggaaggttgaagtcggtttcggtattttgagagttttagggttttttaatgttttattttttttttaggtttgttttggtttgttttgtttttttagggtagttggtttttgttttaggggagtatgggaatagtttgggtgagaatgggggaggggttttttagtaggttttattttttttatttggtataatttttattttgtatttagtgatgtttaggagttagtataagaatttttgagtttttttgtcggttttttttattgtggggtttataggatggttgggtgtgttggggaaattgagggagatgatttgtgggtgttagtattatgggattttgggtgattttggatttatttttttttttttttaggtgttttttgagttggcgaaaaggagagttggatgttgggattttataaattcggcggtggatgtgagtttagttatagtatggattttggttagttttggaatttgagtttagagatttttgaaaaaatgtttttcgataattgagtatttattatatgttggatattgtattaggagatttgtgtgtatttttttattgaattttataattattttttgggatggtttttgttattaagtcgattttatagatgagaatattgagggttagaaaagataagtattttgtttaaggtgatacggttagtaagttgtggagtttggatttgaattaggtttttttggagtttggagttcggtttttttatttttggtagagatttgtggttttagggggcggagtttagtttatgggggaagtaagttttttttgttagatttgtttgaggagtagtgagttttttatttaggaaattattagtaggttaggttggattgttttatttttagtttttttttttttttgtagattgttttgtttttagtttttttttttttttatttttttttgtagagtgcgttagatttattttatagaaggggattttgagatttttttttttttgcggggtagggtatgtggtttagacgagtcgtttttatttttagttttgtttttaagttttgggtgattttagtattgagtatcgtttttgagttttagttttttgtttatatttagtgttattaggtattagaaacgtaagtgttttaaggattttgggtgaaaagtcgttttagcggcgagtatatattaattaataaaatgttttggtcggggttgggtagaggaagtaagcgggtagtcgaggtgatagttggagggaggagcgggggtggagtcgggggaagggtggggaggggatgggttggagtttcgggtagtgtgcgaggcgtacgtataggagtttgtattttgcgtttcgtattttagtagtcgcgttatgagtcgtgagtgcgatttcggtgttcggtggggaatttttttggttttttggtggagttttgaatgttaggtttagttttttattttttttttttgtagggagttttttgtttcggtttttgttgtttttgtttttgttttcgtcgtttttcgttttgttcgcggatttaggggcgtttacgttaggtaggcggttttatttttttttaagggaattttcggttttgcgtttttggtttggttttaattttttttttttttttttagcgggtttagttttttttttttgttcgcggtgttgagaaagattgaggttgagttttttggtgggatgggggttttttgaagttttttcggcggtgtggttttggttaatgggttatttagtttttttaggggaaatagtagattgggatttggtgttaatttggggagaagggatagtttttatttattttttttatttgttttgggttttagatgtttaagtagtttttgtatttaataatttcgttgttttttataggggtttttttgggaggaagtcgtaggtattaagggaaatgagttttttttttttagtttttaatcgtttgggaatttattttgatttttattgttagtggagaaggttttttttggtgaagatttcgggagaatatgggagatggaaatatatttaggagtcgggatgttttatttggggtttaagagatttttattgagtaaatgaggaaatcgaggtttagtaggtgttatgattttttaagtttataaaatatatggtgggtttaggatttgaatttaggtttgtttgcgtttatatatttcgtaaggtttttttatagaaagttgtttttatttataatggattcggagttattttgggttttatgggggaggttgatggggaaatttcgttttttttttttttatgtatgtgttaggttttaggtgaaggaatttagtttttcgtttagttaattttttttttttagttcgttgtttgtgtgtgtgcgtgtgtgtgagtatgtgttttagttggatatagttttttttattatttagttgtgtaaaatttttaaaatgaggtttagagagggtaggagggagtagagggagttcgtattttttgttgtgatgttttaaggatttggtgcgtgggggaaagaggaaagatatgtatatggattttggattagattaagttttttgaaacgggttttgggtgggtggtatttaggggatttaaagagaggacggagggtgttttaggaaagggattgcgttgaataaaagtttggtttatgggaagaggaggaggaagatttatgtggttagtattttaaagtttataaaggttggttgtggatatttatttttttggtgtttttaatagttttgttagagagatgcgttagatttagtttatagaaggggattttgaggtttagagggagtgaagttatttgtttgaatttttatagtgagttggtggtggggagtagaaggggttttttaggttgtttcgttgatttattttgttagtttttggattagtttagtattttttttgaggttttatttggttttatttaggtatttttggtatataggttttattcgtttgtatttttttttagtttatttattaatgtataatgagttatggtttgtgttattttgttttttgttttttttgtttttttttgtataataaatgtttatacggaattgtttttttttatttttaagggttatttatgttagtttttggttggggtttggagatacggagttgggaggagttgataggttgatggtggagttagaaatgttaatagattgttatttaaggggattagggttgtgcggagtttatgggaggaagtaggggtatagggagtttagggaagggagtaggggtgtgcggagtttaggggagggagtagttgttttttagtgcgaagaattgagggaggttttttggatttgatgatttttggattggatttcgaaggaggtggcgggtgggggaaatattaagagattcgattaggaaatatcgtaagggtaatgtggagtaggaggttgaggttggatgcgtaatgtggggatgagattggaggttagaaaattggtatcgaggtttttgtaaggatttaggaaagaacgaatgattggtggagtgtaggggtagaaggtttgggttgtttttatatttttaagtttgcgagtaaattgagggttaagttatttgggtatttgttttaggaagttaaagtttgttttttgtttttagaggtaaaggagatgaagagatgagggttgtatttatttaagagggtaggcggagggagagaatgttgtttttgtttttttggtgggtgaggagatggaggttagtttggaggtaaggttgtgtcgggggcgttttgaatgtttaagtattttttttttagtttttggatttgatttagtgtttattttttagatggggatagggtatgatttggtaattagagttgtatgttaggtagaggagttttaggttagttgattcgggtatatggggtaagatgttagttgtgttaaggttgttcgggtgtttgtatttgttttcgttagtattagttgggtttgtgggtcgggagagggtttttttattagtaggtttttttagttgttgggtttagttgtttggatttggtgcggtggtgtttaggtgtggggattggggtttaggttaaattagttagggttttttattttttttttttttttttttggttgttaggtttttagagattttttaaatattattttttaggggatttgggttttgtttttttattgggtaattttgtagtttgatatttttgtattttggaggatttggtgttttttggttgtgtttgttttttagttacgtttagttttggatttggagttttgatttttgggttagggggtgttttttgtttaaatttttggaaaggttttggaattaggtagttttggatagtttttatttgtggggatggggattagtagtttggtttttgggttgcgtgtgtttggtatgtagcgtggtgtgttgattatttttgttttcgcgtgttttggggatttagtgagagtaaatgggaaggttttttgttgatggggtagttgtgggagggttgtattgatataaataatggagagggatagattggttttatttagagtagagggtttggacgtcgaaaggaaggttttttttagttcgtttgttaaattttttttatgggatatatagaaaaatgaggttttagaggtgggagggatttatttaagaatgtatagttagtaagagtagttattttttaatatagtttttttaagtaattatttggtgtttggttttgtgttgagtatgggggatttaaagtgaattagatttggtatttgtatttttttggtttttttttttgatgaataggggtgttttttattgagtatagaattgagttggcgtgaaaatatgtaggattgaagttagatcgaaggaaggtttttttgtacgaatattttttaaagatttggttgtggtaggagatggtgatttttttggggttttggttttattcgttttggatttttaaggtttattttgaaggaatgtgataaatttaatttaattgggttatttttagtttgtattaaagcgattttttttttttattttttttttaaatttagttttgggtatttttaggagtaggaggaggagggagattaagttttggtttcgtaattttaaagtagtggggtttgggtaagttttttgttttttttgggttttatattttttattatgtaatggggagttttatttattttttttagggagtgttggggagataaatgagcgtgggtgtggaaggttgtggatttggtcggttggagttttggttttttggttgggttgtgatggttaggttgtagtttagtggtatttagtttttttttcgtttattttgatattttggggtattagcggtaggtttattgttgttttttttgggagaattttttttgttttagagtagtggtgtttatggaaagaacgtggcgggggaggcgggaggggggaagttggatgggtcggattgggagggaggagttttagttttcgtatagttttttttggtagggagggtgtgggtagtcgttttagttttagcgtttggagtttgtggtttttttgtttgtcgaggtagagttttagggttatggcgggaggtttttcggttttattttagatagttgttgagggtttggaagatgagggattttttttggttaggttggaggtgattaatttttttattttattttatttattttataaatattcgttaagttttggttattatatttggattttagatttggttaagttttaattgtgtgtatagtttgtgttgggggaagagaaagttttaagggaagcgggggtttttttttttggaagtttatggtggagaagagtaggttgaattggaattcggagttagggtaagggagagtgggaggagggagtgtggatatttggggaagattttttggggaggtaaggcgtgggtttagttgatttggaggaaatgtattaaggaggttaatagtttggatgaaggatggagatgttgagggtttggggttaagggaggggttggcgtagaatgttggagttgtacggatttttggagtttattttgagatttttgttgtggtagggatggggaaattgagtttaggggaggtttaatttttgtgtttttagagtggtagaattagatcgtgagttttagcggattttgtgtgttagggttgggagttgggtagtgggtgttataggggtttttgggtaggtgagagagttaggttagtaggaggggtaagaagaagagttttagtagggtgataagtttttttttgggggaattagatttttgagttagtacgggggttgttttagaggttttttggtttttttgggtttgtggttgggggaggcgggggttggggtattgttaggttttttttttggattttgtttgttaggtttgtttgtggttgtttgataaagtttttttgtttagttttttttttttgattttttttttttatatttttgttggggttattgtggggttgtggggagttgttagggtttaagtaaaattatttgtatgatttttgtggtttttgtttgtgtgtgtgtgtgtgtgtgtgtgtgtgtgtgtgtgtgtgtgtatttgaggtggtgttgtcgttttcgaagtggggattaagaggattttgttgtttaggttaagttttgtgttgtgaagtgaggagtgaggagattgagattagggtaggggatagggggtaggttttgtttagggttatgttttttgattttagtattttgagatgatagtattttatttttagttgttttggttttttattatttttttgatttgtaataattagttgtataaagaatttatattttttgtaacgttggttttgagtttagataaggaagtatgtttgtagaaaggagttcggcgttttttgtgtaaggttagagatggagttttttgttaggcgttaggagtttttggtttgtttagttttgttttgtttttttggttaagttattatttgtttttgaattttagttttttttattgaatagggtggtgggggtgatggtggattttattgaatttgaggagtttgtaattttgttgttaaagaattattgaggtagatttagtaagggggtggtggtttgagggatttgggttagatgttaagagggatttttttatagagtttttttaggaggtagtagggcggatgttagagttttatgtatttttttaggagattttttagttttattttttttatttttttggtttgtgatttttttttggattttagagtttagattttattttgatgtgggttaagtttgattttattaggaatgggggttgaggtagttgagattttggagtttttttttttttgtatatttattttttgtttttagggttttggaaaatttttttttttagatttggttgttgaggttgtgggggtggagtggaagtgaagggatgggtatttggtttggtgagatttgtggggtgataggtttggttttttttttttttggttttaatttttttatttgtaatgtggatattatgatatttgtttttttttattttttgtagaaatggaggaatggtgagggatttcgtttttttagtgtttatggggtggtggtttgggagaagttttcgttttcgttttcgttttttttttgatcgtttttttatttttcgtttcggtttgtttttgttattgaattttgattaggtaggaagtgaacgttttagaagttcgtggttgaggagttttattagtttttttttaatttttagtgttatagtcggggaatttttttttgtcgtcgtttggtggtaatagggagggagggggcgttttttttgggggtttgatgtgggttaggttggagttttagagtagggtttggaaatgttaggatgggtggtttatgtttatagaggtgggaataggggtttttttgggggaattttgaagttttggtatttagtgatttaggacggagttgcgatttaagtttatgtttttggttttttatttttttattaggggttagatgggggttaggaggttattttagtatggtttttgatttttattttttatttatagt

SEQ ID NO: 2194 - DNA, 10377 bp, Artificial Sequence
  chemically treated genomic DNA (Homo sapiens)
  unsure 10329, 10340: n is a or g or c or t
attgtgggtgagaaatggaggttagagattatgttagggtggttttttgatttttatttagtttttgatgggggaatgaggggttagaggtatggatttaagtcgtagtttcgttttgaattattgggtgttagggttttagggtttttttaaggggatttttgtttttatttttgtgaatataaattatttattttgatatttttaggttttgttttggaattttagtttagtttatattaggtttttaggggaagcgttttttttttttttattgttattaaacggcggtaggagaagatttttcggttgtgatattgaaagttaagaaagagttgataaaattttttagttacgggtttttagagcgtttattttttgtttagttagagtttagtagtaagagtaggtcggggcggggggtgggggggcggttagaaaagggacgaggacgaggacggggattttttttagattattattttatgaatattaggaaaacgagattttttattatttttttatttttgtagaaggtagagaagagtaggtattataatgtttatattgtagatggggaaattgaagttagaaaaagggaaagttagatttattattttataagttttattagattaaatgtttatttttttatttttattttatttttatagttttagtagttaagtttaaggaaagaagttttttagaattttggggatagagggtgggtgtgtaggaggagggggattttaaggttttagttgttttagtttttatttttgatggaattagatttggtttatattagggtggggtttgggttttaggatttagaagaaggttatagattaagggaataggagagatagggttagaaaattttttgggagggtgtatggagttttggtattcgttttgttgttttttggagaaattttataaggaaattttttttggtatttaatttagattttttagattattatttttttgttaaatttgttttagtgattttttagtagtaaagttatagattttttaggtttagtaggatttattattatttttattattttgtttagtgaaggaaattgaggtttagggataggtgataatttggttaaggaaatagaatagagttgggtagattaaaaatttttagcgtttggtaggaggttttatttttgattttatatagaaaacgtcgggtttttttttgtaaatatatttttttatttgggtttagagttaacgttatagggaatatggattttttgtgtaattggttattgtaggttaaaagggtagtgaaaggttagagtagttgagggtgaaatgttgttattttagggtgttaggattagagagtatgattttgggtaagatttgttttttattttttgttttggttttagtttttttattttttattttatagtatagggtttgatttgggtagtagagtttttttggtttttatttcgaagacggtaatattattttaaatatatatatatatatatatatatatatatatatatatatatataagtaaggattataagaattatgtaaatagttttgtttaagttttggtaattttttatagttttataatggttttagtaggggtgtaggagggaggggttaggggaagaaggttggataaaaaggttttattaggtagttataggtaaatttggtaggtaggatttagggaaagggtttggtagtattttagttttcgttttttttagttataggtttagaaaggttaagaagtttttggagtagttttcgtgttggtttagaggtttggtttttttaagaaaggatttgttattttgttagaatttttttttttgttttttttgttggtttggtttttttatttgtttaggagtttttgtagtatttattgtttagtttttaattttggtatataaggttcgttaggatttacggtttagttttattattttaagggtataggggttaggttttttttaggtttaatttttttatttttgttatagtagggattttaaaatgaattttagaggttcgtgtagttttaatattttgcgttagttttttttttagttttaaatttttagtatttttattttttatttaggttgttagtttttttaatatattttttttaaattagttgagtttacgttttgtttttttaagaagttttttttaaatgtttatattttttttttttatttttttttgttttggtttcgggttttaatttaatttgtttttttttattataagtttttaggagaagggattttcgttttttttaaggttttttttttttttagtataggttatgtatatagttggggtttaattaggtttgggatttagatgtggtagttagagtttaacgaatgtttgtggaataaataaaatgaagtgaggagattggttatttttagtttgattaaaaggagttttttattttttaggtttttaatagttgtttgaggtggagtcggaaggtttttcgttatggttttagagttttgtttcggtaggtagaagagttataagttttagacgttgaagttggaacggttgtttatattttttttgttaagagaggttgtgcgggagttgaggttttttttttttagttcggtttatttagttttttttttttcgtttttttcgttacgttttttttataaatattattgttttggggtaggaaaagtttttttaggaaggataatagtgggtttgtcgttggtgttttaaggtgttagggtgggcggagaggagattgggtgttattagattatagtttgattattatagtttagttagaaagttagggttttagtcgattaagtttataattttttatatttacgtttatttatttttttagtattttttaagagaggtaggtgagattttttattgtataatgaggaatgtagggtttagagaaagtaggaggtttgtttagattttattgttttgaagttgcggagttaagatttaattttttttttttttttatttttggaggtatttaggattggatttggggaagggatggaaagggagagtcgttttgatgtagattgaggatgatttagttgagttggatttgttatatttttttaaagtgaattttgaaaatttagaacgaatgaaattaggattttagggggattattattttttgttataattagatttttaggaagtattcgtataggaaggttttttttcggtttaattttaattttgtatgtttttacgttaatttagttttatgtttagtggaggatatttttgtttattaagaaagaaaattaaggagatgtaggtattaagtttaatttattttgagttttttatatttagtatagggttaggtattaagtagttgtttgggagagttgtattagagagtggttgtttttattggttgtgtatttttgggtgagttttttttatttttggagttttatttttttgtatattttatgaagggggtttagtaggcgggttaaaggaggtttttttttcgacgtttaggttttttattttgggtagagttaatttgtttttttttattatttgtattaatataatttttttataattgttttattagtagagaatttttttatttgtttttattgagtttttaagatacgcggaggtagagatgattagtatattacgttgtatattagatatacgtagtttaaaggttaagttgttagtttttatttttatagatgaggattgtttagaattgtttggttttaggatttttttaagggtttgggtaaggaatattttttagtttaaaagttagggttttaggtttaggattgagcgtgattaggggataggtatagttagggaatattaagttttttaggatgtagaggtgttaggttgtaagattgtttagtgaagaggtaggatttaaattttttaaagagtaatatttagagagtttttggggatttggtagttagagagaaaaaaaaaaaaggtggggaattttgattggtttggtttgggttttagtttttatatttaagtattatcgtattagatttagataattgggtttagtagttggaagagtttgttggtggggaagttttttttcggtttatagatttaattggtgttggcgagagtaggtgtaggtattcgggtagttttggtatagttggtattttgttttatgtgttcgggttagttggtttggggtttttttgtttggtatgtagttttggttgttaggttatgttttatttttatttagaagatgggtattgagttaagtttagagattagaggggaagtatttgagtatttagggcgttttcggtatagttttgtttttaggttggtttttatttttttatttattagagaggtaaaagtagtatttttttttttcgtttgtttttttaggtgagtgtagtttttatttttttattttttttgtttttagaggtaaaagataggttttggttttttggggtagatgtttaagtagtttggtttttagtttattcgtagatttggaaatatgagggtaatttagattttttgtttttgtattttattagttattcgtttttttttagatttttgtaggagtttcggtattagttttttggtttttagttttatttttatattacgtatttaattttagttttttgttttatattatttttacggtgttttttggtcgagttttttagtgttttttttattcgttatttttttcgaggtttagtttaaaagttattagatttaagaagttttttttaatttttcgtattgagaggtagttgtttttttttttgagtttcgtatatttttgtttttttttttgggttttttatatttttgtttttttttatgagtttcgtatagttttggtttttttggatgatagtttgttggtatttttggttttattattagtttgttagttttttttagtttcgtgtttttaggttttagttaaagattggtataaataatttttggggataaaaaaaaataatttcgtgtaaatatttattatataaaaggaaatagaaaaggtaaaaaataaaatagtatagattatggtttattgtgtattagtgaatggattaaaaaagaatatagacgggtgggatttgtatattaagagtgtttggatgaggttagatggggttttagaggaagtgttgggttgatttagggattgataagatgggttagcgaggtaatttgaagagttttttttattttttattattagtttattgtgaggatttagataagtggttttattttttttgggttttagagtttttttttgtagattgggtttaacgtatttttttggtagggttgttgagagtattaaagaggtggatgtttataattaatttttgtaaattttaaagtgttggttatatgagtttttttttttttttttttataaattagatttttatttaacgtaattttttttttagagtatttttcgttttttttttgggttttttaaatgttatttatttaaagttcgttttaggaaatttggtttgatttaaaatttatgtatatatttttttttttttttttacgtattagatttttagagtattatagtagaaagtgcggattttttttgtttttttttgttttttttgggttttattttagagattttatatagttaggtggtggaggaaattatatttaattgggatatatgtttatatatacgtatatatataagtagcgagttgggggaggaaggttggttgagcgaggagttgaatttttttatttggaatttggtatatgtatgggggagggaagggcggaatttttttattaattttttttatgaaatttagagtggtttcgggtttattgtgggtagaagtagttttttgtggaaagattttgcgaagtgtgtggacgtagatagatttgagtttagattttgggtttattatgtattttgtgagtttggggaattatggtatttattgagtttcggtttttttatttgtttaatggggattttttaaattttagatgaagtatttcggtttttaaatgtatttttattttttatgttttttcgaagtttttattaggggagattttttttattggtaatgggaattaggatgggtttttagacggttagaggttggagaaagggaatttattttttttggtgtttgcggtttttttttaaagaggtttttataggaaatagcggggttgttgggtgtagaggttgtttagatatttggggtttagaataggtgagggggatggatagggattgttttttttttttaagttggtattagattttagtttgttgttttttttgaaagaattagatagtttattagttaaggttatatcgtcgggggggttttagggagtttttattttattaaaagatttagttttagttttttttagtatcgcgagtagaaaggggaagttgggttcgttggaggggaaaggagggggttgaaattaggttaggggcgtaagatcggggatttttttggggagggatggggtcgtttatttggcgtgggcgtttttgggttcgcgagtaggacggggagcggcgggagtaggagtaggaatagtaagaatcggagtaagagattttttgtagaggagagagatgaggggttgagtttggtatttaaggttttattaggaggttaagaaaattttttatcgggtatcggggtcgtatttacggtttatggcgcggttgttggggtgcgggacgtagagtgtaggtttttgtgcgtgcgtttcgtatattgttcggagttttagtttattttttttttatttttttttcggttttattttcgtttttttttttagttgttatttcggttgttcgtttattttttttgtttagtttcggttaaggtattttattaattagtgtatgttcgtcgttaaagcggttttttatttaagatttttgaagtatttacgtttttgatgtttggtggtattagatatagataggaaattgaggtttagagacgatgtttaatgttgaggttatttagggtttagggatagaattggggatggaagcggttcgtttgaattatatattttgtttcgtagagaagaaagggttttagagtttttttttgtaaaatgggtttaacgtattttatagaaaagggtagagaagaaaaggggttagaaatagggtagtttgtagagaagaaagggggttagaaatggggtagtttagtttggtttgttgatggttttttagatgagaaatttattattttttagatagatttaataggaaggatttattttttttatgggttgggtttcgttttttgaagttataggtttttgttagaaatgaaaagatcgggttttaaattttaagagagtttagtttaaatttagattttatagtttattggtcgtgttattttggataaggtatttattttttttagtttttagtatttttatttataaaatcggtttaatagtaaaaattattttagagggtggttgtaagatttaatgagggaatgtatataaattttttggtgtagtgtttagtatgtagtaggtgtttagttatcggaaggtatttttttaaagatttttgaatttagattttagggttggttagggtttatgttgtagttagatttatatttatcgtcgaatttatagaattttagtatttagttttttttttcgttagtttaggaagtatttagaaggaggaaggaataggtttaagattatttaaagttttatggtgttggtatttataagttattttttttagtttttttagtatatttagttattttgtgggttttatagtggggaaagtcggtaggagagtttagaggtttttgtgttggtttttgggtattattgggtgtagggtagaaattatgttaggtgggagaggtgaaatttgttgggaagttttttttttatttttatttaagttgtttttatgtttttttgggataaaagttagttgttttagggagatagagtaagttagggtagatttggagaaggagtggggtattggagggttttggggtttttagggtgtcgggatcggttttagttttttttttttttttaaattaagggttttttagtatttatagggtaaggagatgggattattagtaaaagggatggggatagggtggaggtgtgggggtttagttgtttaaagaaagggggagtttttggtgagaagaaaggagagacgggtttgaatgaggttttattttttatttttaggttttttttttttttgggttttgagtttattaagttattatatttgtgttttttgttgatttttaagttatttatttgtatttaaaataagaaatatttgtgtggttttggtattaatgggaagagtttttattttagaattagaagtgagtttaagttattttttttatagcgtgattttaaataagtcgttaggttttattgggtttttgtttttttatttgaataatagaatgagtagattagatggtttttgaggattggtttagttttagtatggagtaattgagtttttattgtagttaggttttgtgattagtattatagattttaatatagttgtaatataggagaggatggagtttgagagagtaggtagggtgtcgaggtagttttttagggatgaggtaggattaagagtatggagtggggagaaggtagatgagagaaatggtggtagaagtgttagggtttggtgatcgattagtattagagtttaggggaagaaaggtgttgaggatatttagttttttggtttaatgttggtggtaatatttagggaaggggagttggtatgggtaggtggaatttgaatttgggttttttgtatttgatttattttaaggaatgaggaggattaaattttttttgttttttttagtttggtttatgggttagtatttttaatcgttttagtatgtagttggatatataggggagaggtttggggtagtttttgttttagttttgggaaagagattatagtatagggttatttttttttgttttttattgtaaagttatagtttaaatgtttaggattggtgttattattttagtttttaagattgtgagtttttatttatagggtaagtttattttttatgttttttggtaggttttttttaatatgtttttttttttttttttttttttttaggaagtttttgtgttttttttggttatagtagtgttatttttgattatattgtttttttgtttttaaatattatgaggttataagagttttggttatttttgtagttttaaggttaagtataggatttggcggataaaagatatttagggaatgtttgttgtttgaataaagaaatgaatgagtatttaaaagagtagtgaatgtattaaaaaaatagattaggtttagtattagttttatcgaagtgattgttaattatttatttgttgtgacggttattaaaagtattattgtttgttttagtttttttgttttttttagtttgttttatgggttagtatttttagttgttttataggtttagttttattttaggttttgagttttttttagttaaggtagtaaggatttttttttttatattttattggtaataagggataggatttttttttgtatagttttttttttattatttatattaattacgtgtttttttgtttattttagttatagtttggattgtaatgtttttggagaggttttatttttgttgggttttatttattatttggaaaattagagttgatttttatttgaattatttatggatttagttttattcggttttatttgtgtaggtagttttttagttaggtaggaaggttttggatttaatttaatatttttttaaattttagttttttattttatttgattttttagtgtgattttaagtagtaaattgttttttgtggattttagtttttttatttgtaaaaacgtggttaataatgttatttttgtaagagttgttgtgaggatgaagtaagatagtttttgtgagtatttttagtatttagtaggagtttaatgttagttttttattggttttcgtttttattttttatttgagtaagagggttgtatgaaaaattttttttttttttttttttatttatttagaattaggttagggttgattatggaggtaataataataatggttaaatttnttggggggtanttttagagtcgaattgcgagtttagtaacgttaaatt

SEQ ID NO: 2195 - DNA, 4654 bp, Artificial Sequence
  chemically treated genomic DNA (Homo sapiens)
atagatgttttgtatagttattatttggtagtagagaaattttttaagtttattttattatatgtgatgtttatatttttttgtaagtattcgtatattttatatttttaatgggtttgatttttaggatttatattaaaggattttttttatttgttaatggtagtgatattttagttttagtaagaggtttttgttttggagatatttaggtttattttttttaatttttttaaaaaataattttaatttttattttagatttatggagtataaatgtaggtttgttatttggatatgttgtgtgatgttgaggtttgggatatagagaattttattatttaggtagtgagtatagtatttgatattatgttttttagtttatgtttgttttttttttttttttttttagtagttttagtgtttgttgtttttatttttttttttttttttttttttttgagacggagtttcgttttgtcgttaggttggagtgtagtggtgtgattatggtttattgtaatttttatttttcgagtttaagcgatttttttgttttagttttttgagtagttgggattataggtgtgtattattaagtttagttaatttttgtatttttagtagagatgggattttatcgtgttggttaggatggtttttaatttttgattttataattcgttcgtttcggttttttaaattgttgggattataggaatgagttattgtgtttggtttatgttattatattttattataattaaaaaatataaggaattatagaaaaagtaaggaagttatttataattttatataatatttttttatttttagtttttattgttaattataattttttggagaagtaaatggagaaagtatattgtaggttaatttatgtttgaggtagtttattttagttatagaaaggggatggatttaagtaggataaaaggagaggtagggaggttggtgatgtagtgatagtaataaggtaaaagataatgaaagttttaattagttagttttttgttaaaagatagatattagaaatatattgagaatttaaatatgtttggtgcgtgattaatgataaagatgaagaggaagaaatttaggtatttagttttagaaatttagcgatgtattattatttgagattagatatatagggaaattgaaatttaataatttaattagaaattttaaatatttttattaaaattttaaataatttgattataattgttaattgggaatgtgattatagtggtttgtaatttgttaatttggttaaaatggttattttttagattgtttttttttatatgtttttggttggggtaaatcgtaagagatattttgtgtgagttttgtaaggtggaagtgaagtagtatttagaatgttttgatatgtaaagggttggtgtaggagtattaggtattaatgtagtttacgtgtacgtgatattatttatttgttgttttatttttttggtatggggtagtagttagttttgtagttagtttttttatttttttttggatttttttttagtttttttaatttttgagtcggggagtatttagttttaagataaagtgtgttagttttttttgtagatatttatattattaaagttagaggtaagagagattgatataggatttatttatttttttgggttttggttggtggttttaggatttagtttgttttttttttttttttttatttatatgtatttttttattttttgattgttagttatgtaaattttatgttttagtatgagatataaagataatagttttatagagattggataattatattttataattgtgtaaggtttaatttttggtggttttgtttttttgataaattttgatagagaatttggtagtagataagattttaggggtatagaatttgaagaatgagttgtttaaataggttttaggttatttggaatttattttttgatttttttaatgttttgtttttaatggttaagaggatattagtattatgtagtggtaaatagttatataaattattatattgatatttttaattaaatgtttatggaacgacggttggtaaattttttttgaaaagggatagatgataaatattttaggtattggaagttatatagtttttgttgtatatattttatttagattttgtatagtttttgtttttatttaattttgtggttgtagtataaaaataattatagatatatgtgtatgaatgaacgtggttatgttttaataaaattttatttataaaaataggggtaagttagatttggtttaggagttatagtttgttgatttttgttatagaaggaaagttttggatgaataagtatttgttgttatagaatattttagtgaaaatataaattataatgggattgattaattgtttttaagtgtgttggagaattttagaaaagaaaatgatgagttttgggttttatatttttagtttaaggtttatataaggaagttaaatttttttatgattattttaaaagaattttgattgatatagtgatgattgaattaaaattagtagatgttttgtaggttaattttaaaaagaagtaataaatttgtaggggagttaatttgggatatgttaagttggaggtgttaatgaagcgtttaagtggtgacgtttggtagatagtaggatgtatagtttgaaattttgggagaaatgtttatttggaaattatttatacgtatttaattgttataattataagaataaaagaggtaataaggaaaatgagagagagagagaaagagagagagagagaaagagagagagagagaaagtgtaggaggttaaagtagattttaagaaatttaatatttagtggagggataggggacgaggggttcgtaaaagagtttgagaagttgaagattttagaagagagtagtatcgttaagattaaggaattggagtgtattaagaaattgcgagtgaatgtaataaaattgtatatggtagaggttgagaaagttttaagttaaaattgaaataaaagatttattgtttttaaaagaaataattggagaggaaaggtaaggtgatgaatttttatgaggtgtgttattaggaatattatttattttataagtatttttttttttaaagaggaatattttttttaatagtttaatttagggtggtgtaaagaagttttttttttttttttgaagggtttttttaaatgtttattttatgtataaagaattattatgtttttaattgagtagatgttttggataattttttgaaggaagatcgtttagattagtttaatgaaatagatatttttcgcgtattgacggaaatattggcggtatatattgaggtcgtattttaggattagatttgtcggttcgaatatacgcgataagagtaaagaagttaaaagagaagtgtttgtgtggttttttttacgtgggtgaaggattgtgttagttgagaggtggtagagtaggaagttgtttgaggatttttatttatttggtgaaaaattgggtttcgtttttaagagagtaagtcgagggtcgtgtaggagttggaggagagaaatgaaattttggaagagttagtagaaggtgggaaatttttattttatttatagtagtatagattttatgtagttaaaagtatgaatgtttttttttttgtgatttatattgtaaagggagtattttttttatgtgtaaattaattatagtggatatgtttgtttatatttagattagtttttagatttaaaatttgtttttgtttttgtttttgttttttttttttttttttgagatggagttttattttgttatttaggttggagtgtagtggttttgttttggtttattgaaattttcgtttttcgggtttaagtgatttttttgttttaatttttggaatagttgggattataggtatgaattattatggttggttagtttttgtatttttaatagagatggggttttattatgttgggtaggttggtttttaatttttgaatttaggtgatttttttattttggttttttaaagtgttgggattataagcgtgagtgagttatggcgttcggttatgtatttgttttataattatgagaaattaaaattaaaagtttatttgtagatttttttagtgggttataaaatttggaatatttttgaagaaattatttttgttatatatatatagatatatatatagagagatatatatatagcgtaggtgatagttttttggtaatttaattatgaagtatagtttttagaatatttttattgatgaaagattaaattatagtgattttgtgtgaattttggtgtgtatgcgtgtttttgtgtgtgttgtataaatatatatatatattttattttaaaattagagaagaatttgattttgaaagagtaattgataaattttatttttagggagattcgttgttaaaagggaaaaattattttgtttggttttattaaatattatttttcgtttattcgttatttagtaattagagtgattttttagaaatataattgggttatattatttttttgttgaaaatttttaatggagagtatttatta

SEQ ID NO: 2196 - DNA, 4654 bp, Artificial Sequence
  chemically treated genomic DNA (Homo sapiens)
tggtgaatattttttattgggagtttttagtagaagagtgatatgatttaattatgtttttaagagattattttggttgttgagtggcgaatagacgggagatggtatttggtgagattagataggatggttttttttttttggtagcgaatttttttggaaataaaatttgttagttgtttttttaaaattaggtttttttttgattttaaggtgaaatatatatatatatttatataatatatatagaaatacgtatatatattagagtttatatagaattattgtagtttgattttttattagtgaaaatattttaaaaattatattttatagttgagttattaaagagttgttatttgcgttgtgtgtgtgtttttttgtgtatgtgtttgtgtgtgtgtagtagaaataatttttttagaaatattttagattttataatttattgggagaatttataaatagatttttgattttagttttttatggttataaaataaatatatggtcgggcgttatggtttatttacgtttgtaattttagtattttgggaggttaaagtgggaggattatttgagtttaggagttggagattagtttgtttaatatggtgaaattttatttttattaaaaatgtaaaaattagttagttatggtggtttatgtttgtagttttagttattttagaggttgaggtaggagaattatttgaattcgggaggcggaggttttagtgagttaagatagaattattgtattttagtttgggtgatagggtgagattttattttaaaaaaagaaaaaaaaaataaaaataaaaataaagataagttttgaatttaggaattggtttggatgtagataaatatgtttattatggttagtttgtatataagagaaatgttttttttatagtgtaagttatagaagaaagggtatttatatttttggttgtatgaagtttgtattgttgtaaatgaaataaaaattttttattttttgttgatttttttaaaattttattttttttttttaatttttatacggttttcgatttgtttttttaagggcggagtttagttttttattaaataaatggaggtttttaggtagttttttgttttattattttttagttggtatagttttttatttacgtggaaggagttatatagatattttttttttaatttttttgtttttgtcgcgtgtgttcgaatcggtaggtttgattttgaaatacggttttaatatgtgtcgttagtgttttcgttagtacgcgaaggatgtttgttttattaagttggtttaaacgatttttttttaaaggattatttaaggtatttatttaattaaaaatatgatagttttttgtatataaaataaatatttgaaaaaattttttaaaaaaaaaaaaaaagtttttttgtattattttgagttaagttgttaagagaggtatttttttttaaagaaaggaatgtttatggaatgaatggtgtttttggtgatatattttataaaaatttattattttgttttttttttttagttgttttttttgaaggtagtggattttttgttttaattttgatttaggatttttttaatttttgttatgtgtagttttattgtatttattcgtagttttttgatatattttagttttttgattttggcgatgttatttttttttggggtttttaattttttaggtttttttacgggtttttcgttttttgtttttttattgaatgttgggttttttagggtttgttttagttttttgtatttttttttttttttttttttttttttttttttttttttttttttttttattttttttgttattttttttatttttgtgattataataattgagtacgtgtgagtgatttttaaatggatattttttttagagttttagattatgtattttattgtttgttaagcgttattatttggacgttttattgatatttttaatttggtatgttttaaattaatttttttataaatttattgtttttttttaaagttagtttgtaaaatatttattgattttagtttagttattattgtattagttagaatttttttagggtaattatagaagagtttagtttttttatatagattttgagttaagaatgtaaagtttagagtttattatttttttttttgaagttttttagtatatttagaagtaattaattaattttattatggtttgtatttttattgaaatattttatggtagtaaatatttgtttatttaaagttttttttttatagtagaagttagtaagttatgatttttgagttaaatttggtttgtttttatttttgtaaataaagttttattggaatatagttacgtttatttatatatatatgtttgtggttgtttttgtgttataattatagagttgagtagagatagagattatgtagagtttaggtggagtgtatgtagtagagattatgtggtttttaatgtttaaaatatttattatttgtttttttttagaaaaagtttgttaatcgtcgttttataggtatttgattaaaggtgttaatgtgataatttgtgtaattgtttgttattgtataatattaatgtttttttaattattggaaatagggtattaggaaaattagaggatgaattttaagtaatttggaatttgtttagataatttattttttaggttttatatttttggaattttgtttgttattaaattttttattagggtttgttagggaagtaaaattattagaagttgaattttatataattgtgagatgtgattatttagtttttgtgaggttgttgtttttgtgttttatgttggagtatgaagtttgtatgattggtagttaggaagtgggaagatgtatgtaaatggagaaaaggaggaggaataagttgaattttagaattattaattagaatttagaaagatggatggattttgtgttagttttttttatttttaattttgatgatgtgggtgtttataggagaagttggtatattttgttttggagttaaatatttttcggtttaagagttagaaaagttgaaggaagatttaggaggaggtggagaagttaattgtaggattggttgttgttttatgttaaggagatgaagtagtagataagtgatattacgtatacgtgagttgtattggtgtttagtgtttttgtattaattttttgtatgttaaaatattttgggtgttgttttatttttattttgtagaatttatataaaatgttttttacggtttattttagttagaaatatatgaggaagagtagtttgggaaatagttattttaattaagttaataaattataaattattataattatatttttaattagtaattgtaattaagttatttaaaattttagtgaaaatatttaaaatttttaattaaattattaaattttagtttttttgtgtatttggttttaagtaatggtgtatcgttaagtttttaaagttaggtatttagatttttttttttttatttttattattagttacgtattaaatatatttaggtttttaatgtgtttttaatgtttgttttttagtagagagttagttagttaaggtttttattattttttgttttattgttgttattgtattattagtttttttgtttttttttttgttttgtttaaatttattttttttttatggttggaataagttgttttaaatataaattaatttgtaatatgttttttttatttatttttttagaaagttatgattgatagtggagattgggagtagggggatattgtgtaaggttatgagtagtttttttgttttttttgtagttttttgtgttttttaattgtggtaaaatataatagtataggttaggtatagtggtttatttttgtaattttagtagtttgggaggtcgaggcgggcggattatgaggttaagaattggagattattttggttaatacggtgaaattttatttttattaaaaatataaaaattagttgggtttgatggtgtatatttgtagttttagttatttaggaggttgaggtaagagaatcgtttgaattcgggagatggaggttgtagtgagttatgattatattattgtattttagtttggcgatagagcgagatttcgttttaaagaaaagaaagaaagaaaagagatgggaataatagatattgggattattagagaggggagagaaggaggtaggtatgggttgaagagtatagtattaggtattatgtttattatttgggtgatgggattttttgtattttaaattttagtattatataatatatttaagtaataaatttgtatttgtattttatgaatttaaaataaaagttgaaattattttttaaagaagttaaaaaaaataaatttaggtgtttttaaggtaaggattttttgttaaggttgggatattattattattggtaagtgggagagattttttagtgtaggttttggggattaggtttattgggggtgtagaatatacgaatgtttgtagaagaatgtaagtattatatgtaatagagtagatttgggaaatttttttattgttaggtgatgattatatagggtatttat

SEQ ID NO: 2197 - DNA, 3490 bp, Artificial Sequence
  chemically treated genomic DNA (Homo sapiens)
ttttgatggagttttattttgttttttaggttggagtgtagtggtatagttttggtttattgtaattttttttttttgggttcgagcgatttttatgttttagttttttgagtagttgggattataggtgtggattattatatttggttgatttttgtatttttagtagagggggggttttattatgttggttaggttggtgtcgaattcgtgatttcgtgatttatttgtttgagttttttaaagcgttgggattataggtgggagttattgagtttggttttaaatttaatttttattaatatttttattgttatttttttaagtgtagagataattagtaataagtgtaaatttgtttcgtagtatttgattatttttttggtgtaaatattttaaaagtggttgattttaagtaattaatatgatatattgaaggtagagttgggaaaatgtgtagtaatatattattaaataatattttcgtatatagatataatagatataaataattttaaaagtatagataatgataaaatataataaaataattagaaaatgaagagttttgagatttgtattttttgtttttaatataattttattgtaagtttatgtagtaagatttttaataatagtagtgtttaatttttttgttaattatatttttgaaattttagtaattagttattattagttggcgttagtatattatcgattgtaggttttattgatgaggaaattgaggttcggagaggttgttacgaatttgttgtagttatataggaagtattatttaggttgttttaattttaaatttttttttttttatatgtttttttttaaaatataattgatttatttatatgttagtatttaaatattttagtgtgaatggatttatagtttgttgaataaagttattgtttttcggtaggtgggatgggaaatttgattaggcgaaagaataggatgaagggaaaaagaatatttatttaatagtttaggatacggtaggatatttttttttttgggatttgggtaagttaagatttaataattagtaattgtttagtaattgatagaattggtagaatatttattgtttttttaaacgtttgttatttagtatttttttttatatatttttattgtgttaaacgaaaacgttaagatttattttagtagttatagtaaagagtaagtattaataattaagtgagtttttaggagaaaaaaaataaagttattttttaatgtaaatataattcggttaaaggtgtggtttattttttttcgttttattatttttaaataagttatttttgtttttatggattgcgagttagtgattttaggttgtgatattattgtattttagttttaaatttttttttgtaggtagtttgtgggggaaataataaaattagtattttaatattataagtcgtgagatcgtttaggaataattttaatttgtatattggaatttttgtagaagatattttgaatcgttttagatataataggattaggtaaaacggcgttgttttgttagttattgtaggtttttatttgatatagtttttagattttgtttacgaattttttagttggtcgaaggggtcgcggtcgtatatgcgtagttagtttcgttggttgtgcgtttagtttcgtttttagaggcgtcgcgttttttgatagttcgcgggcgtatatacgttgacgcgtaggttgcggtcgcgtaggcgtagtcggggcgttttttcggtataggcgttttttattttagcgtgttttgagtttttggttcgcgaagtgtcgttaggttaagtaggtgttaaaagttcggggtcgtggatttcggttaggttttagtagtatggaggcgtagggtgtagcggagggcgcggggtcgggcgtcgttagcggcgtgttttatttcgcggttttagtttcggttgcggtttttattttggcgttagtttcggtggcggtcgcggttttttaatttattttgttagtgatgtaattttgtgttgggtaggacgaggttgcggttttcgggggtagcgttggggcgggtaagttcgttaggtatttgtgcgaaggggtcggggatggcgaagaggaggttggggaggacgaggcggatttgttagatatttcggatttttcggggggaggcgagagcgcggttagtttggaggatttagaggacgaggagatttattcggggggcgagggtagtagcgggggcgttcggaggcggggtaacggtgggggtagtatgagtaagatttgtatttacgaaggttgtagcgagattacgagttaggtggttaagtagcgtaaatcgtggatgtgtaagaaatatcgtaataagatgtataaggataagtataaaaagaagaagagcgattaggttttgaattgcggtgggattgtttcgattggtagcgcgggaaacgttaaattcgaggtattagatttagttgaggtttggggatgggaggtggaagaagaaattcgattttaacgtaaatcgtatttgtagggtttgtttttttatttttaaatgggtcggtttgtagtgattgggttagtggttgagaattagagtgtttgttttaaattaaagtttatattaatatgtgtaaagtaataatagttttgttgaatttatgataggtgtagaaattttagtaaaaataatgtgatatcggtagagttgttatagatttgggatatggttggaaggatatagagtaaatgatcggtttggtttatcgttaaaggagatttaggaatttagatgaagttggtatttttgagaaagttatttttttttgtttttattattttatttttagtatttagtttttagtatttagtttttagtatttttatttgtaatatttttgtatttagtattttgtttttagtgttttgttttgttaattttttttttagtatcgtatttttagtattgttatatttagttgtttgtttgtagtatttttgtacgtagtattttttttttataattttgtttttagtatttttatgtttagttttttgtttttatgtttttattattttaatatttaatatattttgtttttagtatttttgttgttagtattttgtttttattatttttttttttagtatttttgaggggggaaaaaaaggatgataatggggtataagttttaaaaaatttttggattgtttgatttgaattgagttaaaggtaaaattagtgttttggagttcgatttttgggtgtaaatttttgttgtattttatttgtttttgtggtttgaataggttattaaattttgtaaaatgggtattaaaatcgtgtgttatttatagtgttgttgtgaatatgtgagttattttatattgagggtttatatagtgtttagtaattggttaaagtttgtaaattttaattattattattgttattgttagtggtata

SEQ ID NO: 2198 - DNA, 3490 bp, Artificial Sequence
  chemically treated genomic DNA (Homo sapiens)
tatattattaataatgataataataatggttaaggtttgtaaattttagttagttgttggatattgtgtgaatttttaatatggaatggtttatatatttatagtaatattatgaatgatatacgattttaatgtttattttatagagtttaataatttatttaagttataagggtagataagatgtaatagggatttgtatttagaagtcgaattttagaatattggttttatttttgatttagtttaaattaaataatttaaaagttttttgagatttatattttattattattttttttttttttttttaggggtattaagaaaaggggtagtgagaatagggtattaataataaggatattgagaataaagtatattaagtattggggtagtgagaatatgagaataagggattaaatataggggtattgggaatagagttgtaagaaaagagtattacgtataggggtattatagataggtaattgagtatagtagtattaaaaatacggtattaggaagagggttaatagaataggatattaaaaataaagtattaaatataggagtattataaatagaggtattgagaattgggtattgagaattggatattgagaatagagtagtgaaaatagaaagagatgatttttttagaagtattaattttatttaggtttttaagttttttttagcgatgaattagatcgattatttattttatgtttttttagttatattttagatttatgatagttttgtcgatgttatattatttttattgaaatttttgtatttattatgagtttaatagaattgttattgttttgtatatgttggtataaattttaatttagggtaaatattttaatttttaattattaatttagttattgtaaatcggtttatttggaagtggggaggtaggttttgtagatgcggtttgcgttaagatcgggtttttttttttattttttatttttaggttttagttaagtttgatatttcgagtttgacgtttttcgcgttgttagtcgaggtagttttatcgtagtttagggtttggtcgttttttttttttttatatttgtttttgtatattttgttgcggtgttttttgtatatttacggtttgcgttgtttggttatttggttcgtggtttcgttgtagttttcgtaggtgtaggttttgtttatgttgtttttatcgttgtttcgttttcgggcgttttcgttgttgttttcgtttttcgagtgagttttttcgttttttagattttttaaattagtcgcgttttcgttttttttcggagggttcgaagtgtttaataggttcgtttcgttttttttagtttttttttcgttattttcggttttttcgtataggtatttaacgggtttgttcgttttaacgttgttttcgggggtcgtagtttcgttttgtttagtatagggttgtattattagtagggtgaattgagaggtcgcggtcgttatcgaggttggcgttaaggtgggagtcgtagtcggggttagggtcgcggggtggggtacgtcgttggcggcgttcggtttcgcgtttttcgttatattttgcgtttttatgttgttaagatttggtcggggtttacgatttcgggtttttagtatttgtttggtttaacggtatttcgcgaattaaagatttaggatacgttggggtaaaaggcgtttatatcgggaaggcgtttcgattgcgtttgcgcgatcgtagtttgcgcgttagcgtgtgtacgttcgcgggttgttagggagcgcggcgtttttgggggcggggttgagcgtataattaacgggattgattgcgtatgtgcggtcgcggttttttcggttagttgggggattcgtagatagggtttgggggttgtgttaggtgaaaatttgtagtggttggtaaggtagcgtcgttttatttgattttattgtatttaaagcggtttaaagtattttttataggagttttagtatgtaaattaggattgtttttgagcggttttacgatttgtagtgttaggatgttaattttattattttttttataaattgtttgtaaggggagatttgaagttgggatgtagtggtgttatagtttagagttattagttcgtagtttatgaaggtagaggtggtttatttgaaaatagtggagcggagagggatgggttatatttttggtcgagttgtatttgtattgagggataattttgtttttttttttttggaaatttatttgattgttagtatttgttttttgttgtggttgttgagataagttttaacgttttcgtttaatatagtgaaaatgtgtgaaaaggaatattgaatggtaaacgtttaaaaaaataatgaatgttttattagttttattagttgttgggtaattgttggttgttaaattttggtttgtttaaattttaggagagaaaatattttgtcgtattttgaattgttaagtagatgttttttttttttttattttattttttcgtttagttagattttttattttatttatcggaaagtaatgattttatttaataaattataaatttatttatattaagatgtttgggtgttgatatataggtagattagttatgttttaaagagaggtatatggaagggagaaggtttggaattagagtaatttaggtagtattttttgtgtgattatagtaagttcgtgatagttttttcgagttttagtttttttattagtaaagtttgtagtcggtggtgtgttagcgttaattgatggtaattggttgttaaaattttaggaatataattagtagaaaaattaaatattgttattattaaaagttttattatataaatttataataagattatattaaaaataaagggtataaattttaaaattttttattttttaattattttattatgttttattattatttgtgtttttaaggttatttatgtttattgtatttgtatgcggaaatattatttagtggtgtgttattgtatatttttttaattttgtttttagtatgttatgttgattgtttgaaattagttatttttggagtatttatattagggaaatgattaaatgttacgaagtaggtttatatttattgttgattgtttttgtatttaagaaagtgatagtgaaaatgttaatgaagattaaatttaaggttaggtttagtggtttttatttgtaattttagcgttttgggaggtttaggtaggtggattacgaggttacgagttcgatattagtttgattaatatgatgaaattttttttttattaaaaatataaaaattagttaggtgtggtggtttatatttataattttagttatttaggaggttgaggtatgagaatcgttcgaatttaggaggaagagattgtagtaagttaagattgtgttattgtattttagtttgggaaatagagtgagattttattaaaa

SEQ ID NO: 2199 - DNA, 8123 bp, Artificial Sequence
  chemically treated genomic DNA (Homo sapiens)
attttttattttttatttttgttgttgttgttgttttgggtttttttgagacgtagttttttttttgtcgtttaggttggagtgcgatagcgtcgtttcggtttattgcgatttttgtttttcggatttaagtgatttttttgttttagttttttaagtagttgggattataggagttcgtagttatttttcgttaatttttttttatttttagtagagacgggtttttattttgttggttaggttggtttcgaatttttgattttaggtgatttgtttaatttggttttttaaagtgttgggattataggtgtgagttatcgtatttagtttgttttaaatttaaatatatttttttttttttgagagaaggaaatgtgtgtattgtggaattttaaaaatattgtttaagagatgtatgggagttgagggaataggtagaaagagatgagtttagattattttagaggtagaaggagaagtagtagttggaaataaataggagaaagtttttatggtttttttgtttgtttgtttttgtttttgttttgagatagagttttattttgttatttaggttggagtatagtggcgttattttggtttattgtaattttcgttttttgggttttatgtgattttttgttttagttttttaagtagttgggattataggcgttcgttattatgttcggttaatttttgtatttttaatagagatgaggttttattattttggttaggttggttttgaatttttgatttcgtgatttatttattttggttttttaaagtgttgggattataggtgtgagttattttatttagtttgaaattatttttaaattttaaaaagaattgtggatggttgggcgtggtggtttatatttgtaattttagtattttgggaggttaaggttggtggattatttgagattagaagttcgagattagtttggtttatatggtgaaattttgtttttattaaaaatataaaatattagttaggtatggtggtgggtgtttgtaattttagttattgggaggttgaggtagaagaatcgtttgaattcgggagggggaggttgtaataagttgagatcgtgttattgtattttagtttgggtaataagaatgaaattttgttttaaaaaaaaaaaaaaaaaaattgcgaggtaaggtgggggatgtttgtaattttagtttagaagaatcgtttgaatttgggaggtagaggttgtagtgagttaagattacgttaatgtattttagtttgggtaatagagtaagattttgttttaaaataaataaataaaagaaatagttttagataattttttgttttttttttgtaaagaaatgattttattagaattttttttagaagtttttaagtattattgaaaaatagtttttttagtttttaaattttagatgtagattttttttattgagtgtataaattagttattttaaaggcgttttattttagttattatagtttggggtttttacgggttaagtgagattatgtttttagatattgatagaaggtggtattataagtattgtttacgaatttagttgtcgtttttgtagatgtatgtttgttttagaagtataagtgtttataatttagattttttttttgaatgattaaaaatgtttaaggggaggaattttggttattaaagaagaaaatggttaagcgcggtgatttacgtttgtaattttagtattttggaaggtcgaggtagggggattacgaggttaggagtttaagattagtttggttaagatggtgaaattttaattttattaaaaatataaaaaattagtagggtatggtggtaggcgtttttaattttagttatttagaaggttgaggtagagaattgtttgaattgaggaggtagaggttgtagtgagtcgagattatgttattgtattttagtttgggcgatagagcgagattttgttttaaaaaaaaaaaaaaaaaaaaaaaaaagaagaagaagaagaatgtttagatttgttagttgaattaagttttagaatatggttagttttaaagatgatattttttttttgattaaatttcgaatgagagaaaaggttgtaaattgtaaaaagataagtaaaattttagatagaagtgaaaattataaatttgtagttaatagaatttttagagaataaaaatggaaatttttattttttagtggagttttagttttaattttattaaattattagtgtgtaagttttaatttttaattaagttgggaggatttagattttaagattggttttattagagatttttgttagttttagtgaggtcgagtaaataatagtcgtttgtgttggtattaaggttttaattattgatgttattatttagtggtaatttttgaaggtttgttttaggttttatttgggttgttaaaatgttaattttaaataatgaaatttaggaaatatgattaagtatagagtttatttgagtttaaagtttgaggatggttttttgggtatatgtttttaggttgttttgaatatatgtttttattagtagtagttatagtggggttttaaggaaaaggaagaggtagtttttaagttgttagtaagaatttgtattaaaataatagaaggtgttgattggttatgtatcgtttttagtattattaattttatgtgaataagaagataatgggtgaggtagtttgttaggagtaaaaattttattaaataattgttttggatagttgtttttatggtggaagaggcgttgaatgaagttttatatttttgtttttttgggtttgattattttgtatattttatagagtttagattattttatttttttttttttaggaaaaatgggtggatggtattggtggttttgtttggtttgattatttattttggttttagtaattagattaattttttgtaatagagttgtggattttagtttagtttttacgtatagattttatttttgtttttttcgattattttttttttattttaggtattttatagttgagagttttttgttagtttttaattttttagtagtttttgtttttagatcgtgttttgaggttgtattttttggatatgtttatttgttggattggtatttgttttgttatttttttggttttatttttgcgaaaggaatataaaagttaggattttagtttattttgttaaaaggaaaagaatgagttgaaagttgagttatgtaagtagttgttttttttttcgtttttaagtagacggttatagatagaaggtttaatattcgttttttttatgtaaagtgttgatttgttgaggagtgagttgtatatagtcgattgtttttaatttgtttttttttttttgtaacgtgtggattattatattgtttcgtttttttttttagtttattttttttttttaaatattgaagtttttaaagttatttttggagaaaggtatagattatagattgtttttgtgatatcgtgttttttttttttttaggtattgtttttaattttggtaaaataaatttttaaattgattgagttttgttttaagatattttttggtttaaatttttgaggttttattgtttttaatataggtttttagtttgtttattttttttaggtaggaagatgttttgttgttaagagaaatgtaattttaatacgtaaattcgtttaaatattagagtttagtatttagttttagtcgagttaagaggattttatggttttgttttatagtttggggtttattttgtggaggaggtaagtaaaataggttttgtttttttgatttttatttaattagagttgatagttgcgttggaaattaggtaaatcgtaggtgagttgatgaatgtgggaaattagatgaaaatggttgtttgatggggttaaaacgtaggagaggaatagaatttttttaacggaatggttttagttttgtgatatgaggagattgaaagggtattttagaggtaggttattggttttttagttttatttgtgggtggttttggttaggtaattgtaagagtgtagggtttcggggaggtcgtatttggtaagcgttgagggagggtaaagcggagaggggtgtgagaagagaaaaataatatagagcgttcgagttatgtgaggcgtgcgaggttaattcggttcggagagataggtttatgcggttttagcggtttttatttatgtttggtaattgtttaaaggtattattgtttcggattcgttgtttttatttatgaatttttttttttggaattatgatataaagaataacgtatagttaattaatagtttgttatttttatgtaaatttttggtgagttatttaagaattgttttttttttaagttttataaatttatttgttattgttgtaaattttatgtttagggtaatttgaagttatgttttcgggttgtaatttttaaatttggtttaaataatttttttatttatattaagtttgttttagtttttttttttttttaggtcgacggttttcgtttcgtaagggtgtagggaaggggacgttcgtattttttagtgtttttttagttggggtcgagttgagcgttttttatcgagttttaggcggttttgtggagaagtttttcggtttcgggttcggtttgtattgttagtttttagttttcggcgcgtaggatttagtagggttagcgtcgggcgggcgagaaggcgagagagttagggtcgggcggggagggtatcggtagggggcgcgggtttttaggatcgaaaaggcggagttttttacgcgtattacgtgttttttacgcgtatgcgtttcgtttacgcgtaggtagtatttcgtttgattgggtagcgttgttacgtcggggcggggaagagcgtcgtcgcgttcgggtgacgtttttcgagggcgtcggtagggtcggcggcgtcggtagtagtgtcgacggtagcggcggcggcgggtgggaaatggcggagtatttggtttttattttcggtatcgagaaagataagtgagtgggagtttttcgtcgggggttgggcgcgatcggggcgtagggtggttgaggcggtgggagggcgatcggggaggtttaggcgggtcggcgcggcggtggcgggggaggggcgcgcggcgggaaggagcggtggttttttcggttttttgcgcgtttttcggagtcgtcgtttcgtgggtcgcgcggcggaaaattggagcgggtagaatgaatggggttttttttcggggcgtcgcggtcgagtttttttcggttttggggttcggattggttgatcgttcgacgttcgggttttcgagtcgtcgattttcggaagtcgtttcgagtcgcgttgaaagttgtttggagtattcgggttttttggacgtggatacgtttgttttaattttcggttgtgaatgttttgtcgagtaagttttggtattagtttcgttagtatttagtcgtttatttaatttagggttttaagcgttggtgttttatttatttagttagttttttgtttgtttaagcgatcgttgggtcggtagtaaggagatatgacgagaaaaagtatggtggagattattggattaattatttaattataagagacgtgattcgtttttaatatataggtgtttttggatttattatgggattgcgtttcgataaatttattatgaatcgaaaatgtttttaatatttcgataaatttattatttaagttgaaaatttgtaagtcggtgattgtttttgaagatataattttgatataaggaaaaagatgttttgattttttttttaaggttgtatgttttttttaattaatcgttaggttaaaagtaaaatatttaattttagttttaattgttattttggtacgtattaatttttagtgagttggttgtagtttagattaaatggaatgtttttagacgtttgaaggataatttttattttgaaaatttaaagatttagtatttggtttaatttattttttagttattttggtattttttagtgttatataaagttaatatgattttatgtttttaatgataaatttttaagtttgttatagatgtttttaatgttattttttttaaacgttatttaaaatgttttttttttttaggatggagtttattttgtaaaatgttttttttatatatggtagaattttttgtgttgtttggatgaggaggttatatttttagtaaaattttaagttaaaatttattagttatagttattttagaaatatttagtgggggttaattataggttagtttttggagatttaaatatgggtaaaatttggatattatttttaaggaatttacggtatgattttggcgaatgaatagattagttttatcggaataagagatttttttgagtttagggtgaagaattaatatatgtaggatcggggtattattaattttttttttttatatttgtatgtggtatgatttttgttttgtaaaagtttatttttttatatttttgttataagtaattatattttaatttattgggttatattataaaggttatggttttaatttagaaaagttgattatttaatttaggttatttgtgttttttttttagggagacgtggggttttagtttttagggaataggattaatttttgaaaaatgaagttgatggtttatattaattttaattattatttaagttaagaataaaatatagatttttattaattaaaaaatgtttagtttattatatgtttgaagttatagatgttttttagatttagggatattttaatagtttgtttgtagtttaattgtgtggaataattggatattaattgttgaggtttagggtttgtttattttgaggtagtttttaaataagttttttttatttttagatgattttttaaagatatgttattgtttaattaagttaaataattttaagatttgtaagtttgtaaatatatataattattttttttttttgataaatttggatttttttatttttattgttatttgataataaattagtggttagttagtttttatggtttattagattttattgaggttgaggttttttaattttaattttggattgattgtttaaaatataatggtatttggttaaaaaaaaattgaattttgaataaagtttgtttggtaagatgttttaatttattagagatcggtttttttttttgatattgttggtatataggtatgattgttggttttattggatatggatttggattgttagcgtatttgaatagtattaagggagggttttgtagtagagatagaaggtgacgtaaggtggtttttaaggtgggttcggttagttttttaatagtttgtttttagtgtattgagattaggagaattgatttattttagatttattttttgaaattttttgttggtttggtgttatgcgtttagagagattttgaatttcgttttttgttttttttagataatgatagtattttatgagtattatatgtgaagtatatatacgttttgtttgatttttagaatagtgttatattggtattgttattatttatagatgatatttgagagttagggtgatttgtttaagtttaagtagttggtagtagagttgggattttaatttttattatatcggtgtttttaagagagaatttggtcgtggagaattggagaatagatattgtttaagttatatttagttttagattaatttaatattttatttaagaaataaatagaatagttgtgtagttaggaaagtggaggggatttgaatgaggaggaggcgggttagagttagaatcgtttttgttgaataagtagtgtgtttgtagaaagggaagttgaagttacgttgttttaaaatatagtaaggaagaggaggtgtttaatattacggaaaaaagtttgtgttatgtttttgtgaggttaaaagtaatttgatagtgtatgttatgttgttgatatattttatgtgtttgatatttttttagtaaaataattagtttttatttttttttataga

SEQ ID NO: 2200 - DNA, 8123 bp, Artificial Sequence
  chemically treated genomic DNA (Homo sapiens)
tttgtaagggaaaatgagagttgattattttgttgggaagatattaaatatatggaatatgttagtagtatgatatatattattaaattatttttaattttatagaaatatgatatagattttttttcgtggtattaagtatttttttttttttgttgtattttaggataacgtaattttaatttttttttttgtaaatatattatttgtttagtaaagacggttttaattttaattcgttttttttttatttaaattttttttatttttttaattgtatagttgttttgtttgttttttaaatggagtattaaattagtttaaaattaaatgtaatttaggtagtatttgttttttagttttttacgattaagtttttttttgaaaatatcggtgtggtgagggttaagattttaattttgttattagttgtttgggtttgggtaagttattttagtttttagatgttatttgtaaatgatgataatgttaatgtggtattgttttgagagttagatagaacgtatgtgtgttttatatatggtgtttatgaagtgttattattatttaaggaaaatagaaaacgaagtttagagtttttttaaacgtatgatattagattaatagggagttttaaaaaataggtttgaagtaaattaatttttttggttttaatatattgaaaataaattattaggggattgatcgaatttattttaggaattattttacgttattttttgtttttattgtaaaatttttttttaatattgtttaaatacgttgataatttagatttatatttaatggaattagtaattatgtttgtgtgttagtaatgttagggagggaagtcgatttttgatgaattaggatattttattagatagattttgtttaaaatttaatttttttttaattaagtgttattatgttttaaatagttaatttagagttaagattgaagggttttaattttagtgaaatttaatggattatgaagattgattagttattgatttattattaggtagtaataaagatgggaaagtttaaatttattaggagaggaaagtgattatatatatttgtaaatttataggttttgagattatttaatttgattagataatagtatatttttaggaagttatttaaaaataaagaaagtttatttaaaaattattttagaatgggtaagttttgggttttaataattaatatttaattattttatataattaaattatagataagttattaggatatttttgaatttagaaaatatttataattttaaatatataataagttaaatattttttaattggtagagatttatattttatttttagtttaaataataattaaagttaatatgaattattagttttattttttaggagttgattttgttttttggaagttaaaattttacgtttttttgaaaagaaaatataagtaatttagattaaataattaatttttttgaattaaaattatgatttttatagtatagtttaatagattgaaatgtggttgtttatagtagaaatatagggagatagatttttataagatagaagttatgttatatgtaaatatgaaaaggagaaattaatgatgtttcgattttatatgtgttagttttttattttaaatttagaagagttttttgtttcgatagagttggtttatttattcgttaagattatatcgtgagttttttaaggataatatttaaattttatttatgtttaagtttttagaaattgatttatagttgatttttattaaatgtttttggagtgattataattggtagattttggtttaaaattttgttagaaatatagtttttttatttaaataatataggagattttattatgtgtgaagaggatattttataagatagattttattttggaaaagagaaatattttaaatagcgtttgaaaaaagtggtattaaaaatatttatgataaatttaggggtttattattgaaaatataaagttatgttaattttgtatggtattgaagaatgttaagataattaaagagtagattaagttagatgttgagtttttaggtttttaaagtaagaattattttttaaacgtttgaaaatattttatttagtttaaattatagttaatttattggaaattagtacgtgttaaggtggtaattaaagttgaaattaaatgttttgtttttaatttaacgattgattagggaaggtatgtaattttaaggaaaaaattaaaatatttttttttttatattagaattgtgtttttaagaatagttatcgatttataaatttttaatttagatgatgggtttatcggggtattaaaggtattttcgatttatgatgggtttatcggaacgtaattttatggtaaatttaggagtatttgtatgttaagagcggattacgttttttgtggttagatagttaatttagtagtttttattatattttttttcgttatatttttttattgtcggtttagcggtcgtttaaataggtaagaggttggttaagtggataaaatattaacgtttaggattttaagttagataagcgattgaatattggcgaggttggtattagagtttgttcgataggatatttatagtcgaaagttggaataaacgtgtttacgtttaaaaggttcggatgttttaggtaatttttagcgcggttcgaggcggttttcgggagtcggcgattcggaggttcggacgtcgggcgattagttagttcggattttaaggtcggagaaagttcggtcgcggcgtttcgaaaagagattttatttattttgttcgttttagtttttcgtcgcgcggtttacgaggcggcggtttcggagggcgcgtaaggggtcggaagggttatcgttttttttcgtcgcgcgtttttttttcgttatcgtcgcgtcggttcgtttgggttttttcggtcgtttttttatcgttttaattattttgcgtttcgatcgcgtttaattttcggcggggggtttttatttatttgtttttttcggtgtcgaagatggaggttagatatttcgttattttttattcgtcgtcgtcgttgtcgtcgatattgttgtcgacgtcgtcgattttgtcgacgttttcgggagacgttattcggacgcgacgacgttttttttcgtttcgacgtggtagcgttatttagttaggcgaggtgttgtttgcgcgtgggcgggacgtatgcgcgtagggagtacgtagtgcgcgtgggaggtttcgttttttcggttttgggaattcgcgttttttgtcggtgtttttttcgttcggttttagttttttcgttttttcgttcgttcggcgttggttttgttggattttgcgcgtcggggattgggggttggtagtgtagatcgaattcggggtcgaggggtttttttatagagtcgtttggggttcggtggggggcgtttagttcgattttagttaagggagtattaggaagtgcgggcgtttttttttttgtatttttgcggggcgggaatcgtcgatttagaagaaaaaaaaagttgaggtaaatttgatataagtagagaggttatttgggttaagtttgaagattgtaattcgggagtatagttttaagttgttttgaatataggatttgtaatagtgataagtgggtttataaagtttaagaggggggtagtttttaaatagtttattaagaatttatatgaaaataataagttattaattggttgtacgttgttttttatattataattttaggaaaggaagtttatgggtgaaggtagcgggttcggagtaatagtgtttttaaataattgttaggtatgggtggggatcgttgaagtcgtatagatttgttttttcgggtcggattaatttcgtacgttttatatagttcggacgttttgtgttgtttttttttttttatattttttttcgttttatttttttttagcgtttgttaggtgcgattttttcggggttttgtatttttgtagttgtttggttaaggttatttataggtggagttggaaggttagtgatttgtttttgggatatttttttagtttttttatgttataaggttggaattatttcgttggaagggttttattttttttttgcgttttaattttattaagtagttatttttatttggttttttatatttattaatttatttgcgatttatttaatttttaacgtaattattaattttgattaggtagaagttagagagatagggtttattttatttattttttttataagatgagttttagattgtggggtaggattatgggatttttttagttcggttagagttgaatgttgagttttagtgtttgggcggatttgcgtgttagaattgtattttttttggtaatagagtatttttttatttgggaaagatgagtaaattggaaatttgtattagaaatagtagggttttagaggtttaaattaaaaagtattttgagatagggtttaattaatttagaagtttattttgttaaggttaaggataatgtttgggaggaaaaaaaatacggtattatagaaatagtttgtggtttgtgtttttttttaaagatgattttgagggttttagtatttaaaggggaaaagtgggttggaggggaaagcggaatagtgtggtaatttatacgttgtaagagaaaagaagtaggttgggaatagtcgattgtgtatagtttattttttagtaaattagtattttatataagagaagcggatgttgaattttttatttgtagtcgtttgtttaggaacgaaaggaaaggtagttgtttatatgatttagtttttagtttatttttttttttttgatagagtgaattggggttttgatttttgtgtttttttcgtagaggtgaggttagagaagtgataagatagatgttagtttagtaggtgggtatgtttagaaagtgtagttttaggatacggtttgggaataaagattgttggagagttggaagttggtaagaggtttttagttgtgaagtatttggggtgggggagaagtggtcggagaaagtagaggtaaggtttgtgcgtgggaattgaattgaaatttatagttttattataaggaattaatttggttattagaattagggtagatgattagattaggtagggttattagtattatttatttattttttttgagaaaagaaaaatagggtagtttgagttttgtgaggtgtgtagaatgattaggtttagagaggtaggagtgtgggattttatttagcgttttttttattatagaagtaattgtttagggtaattgtttgatggaatttttgtttttgataggttgttttatttattatttttttgtttatatggaattagtgatgttaagaacgatgtatagttaattagtattttttgttattttaatgtaaatttttgttaataatttagggattgttttttttttttttttaaaattttattgtgattgttgttaatgggaatatatgtttagggtaatttaggggtatgtgtttagggagttatttttaagttttgggtttaaataaattttatatttaattatattttttgaattttattatttgaggttgatattttggtaatttagataggatttgaagtaggtttttagggattgttattaagtagtggtattaatagttggagttttggtattagtataaacgattgttgtttattcgattttattggggttggtaggggtttttggtaaggttagttttgggatttgaatttttttagtttagttgaagattgagatttatatattaataatttgatagggttagaattgaagttttattgaaaggtaggagtttttatttttattttttagagattttgttgattgtagatttgtgatttttatttttgtttgaggttttgtttgtttttttatagtttgtagtttttttttttattcgaaatttggttaaggagaaagtgttatttttaaaattggttatattttgaaatttggtttaattgataaatttaaatatttttttttttttttttttttttttttttttttttttttttgagatagagtttcgttttgtcgtttaggttggagtgtagtggtatgatttcggtttattgtaatttttgtttttttagtttaggtagttttttgttttagttttttaagtagttgggattagaggcgtttgttattatgttttgttaattttttgtatttttagtagagttggggttttattattttggttaagttgattttgaatttttgatttcgtgatttttttgtttcggttttttaaagtgttgggattataggcgtgagttatcgcgtttggttatttttttttttagtgattaaaatttttttttttaggtatttttggttatttagaaggaaaatttaaattatggatatttgtgtttttagagtagatatgtatttgtagagacggtagttggattcgtggataatgtttatggtgttattttttgttagtatttagaaatatggttttatttaattcgtgaagattttagattataatagttaaaatggggcgtttttaaagtaattagtttatgtatttaataggaaaaatttgtatttaaaatttaaaaattgagagagttattttttaatgatatttagaagtttttaaaagaagttttgatgaagttatttttttgtaagaagaaaatagaagattatttgaaattattttttttgtttgtttgttttgagatagagttttgttttgttatttaggttggagtgtattggcgtgattttggtttattgtaatttttgttttttaggtttaaacgatttttttgagttgggattataggtattttttattttgtttcgtaatttttttttttttttttttgagatagagttttatttttgttgtttaggttagagtgtagtggtacgattttagtttgttgtaatttttttttttcgggtttaagcgatttttttgttttagttttttagtagttgggattatagatatttattattatgtttggttaatgttttgtgtttttagtagagatagggttttattatgtaggttaggttggtttcgaatttttgattttaggtgatttattagttttggttttttaaagtgttgggattataggtgtgagttattacgtttagttatttatagttttttttaaaatttagaagtagttttaggttgggtgaggtggtttatatttgtaattttagtattttgggaggttaaggtgggtggattacgaggttaggagtttaagattagtttggttaagatggtgaaattttatttttattaaaaatataaaaattagtcgggtatggtggcgggcgtttgtaattttagttatttgggaggttgaggtagagaattatatgaaatttaggaagcggaggttgtagtgagttaagatggcgttattgtattttagtttgggtgatagagtgagattttgttttaaaataaaaataaaaataaataaataaaaagattatggaggtttttttttgtttgtttttagttgttgtttttttttttgtttttgggatgatttaaatttatttttttttgtttgtttttttagtttttatatattttttaagtagtgtttttggaattttataatgtatatattttttttttttaaaaaggggaaagtatatttaaatttggaatagattgggtgcggtggtttatatttgtaattttagtattttgggaggttaaattgggtagattatttgaggttaggagttcgagattagtttggttaatagggtgaaaattcgtttttattaaaaataaaaaaagattagcggggagtggttgcgggtttttgtaattttagttatttgggagattgaggtaggagaattatttgaattcgggaggtagaggtcgtagtgagtcgagacggcgttatcgtattttagtttgggcgataagaaggaaattgcgttttaaaaaaatttaaaataataataataataaaaataaaaaataaaaaat

SEQ ID NO: 2201 - DNA, 8576 bp, Artificial Sequence
  chemically treated genomic DNA (Homo sapiens)
tagatattttatataggagagtttcggttggtatttggcgggtattttttttggatgaagtttttagaggagggagtaggtagtaatttttgttgttttgtagtttttattagtgatatttaggtaaatagagtttggaggggatttaaagtaaattttagtagatttgtagaagaatggtttgattgttagaaggaaaattaataaatagaaagtaatagtattaatattaataaaaaagatgtttatataaaaattttatttgaaggttattaacgttaaagattaaaggtagataaatttacgaaaatgaaggaaaatttttgtaaaaaggttgaaaattttaaaaattagaatgtttttttttttttaaaggattataatttttcgttagtaagggaataaaattggatggagaatgagtttgatgaatcgatagaagtaggttttagaaggtgggtattaataaatttttttaagttaaaggagtatgttgtaatttaatgtaaggaagttaagaattttgataaaaggttataggaattgttaattagaatagttagtttagagaagagtataaatgatttgatagagttgaaaaatatagtacgagaatttcgtgaagtatatataagtattaatagtcgaattgattaagtagaagaaaggatattagagattgaagattattttaatgaaataaagtatgaagataagattagagaaaaaagaatgaaaaggaatgaataaagtttttaagaaatatgggattatgtgaaaagattaaatttatatttgatttgtgtatttgaaagtgacggggagaatggaattaagttggaaaatatattttaggaagttaggagaatttttttaatttagtaagataggttaatatttaaatttaggaaatatagagaatattataaagatatttttcgagaagagtaattttaagatataaaattattagattttttaaggttgaaatggaagaaaaaaatgttaagggaagttagagagaaaggtttggttatttataaagggaagtttattagattaatagtggatttttttgaagaaattttataagttagaagagagtgggggttaatttaatatttttaaagaaaagaatttttaatttagaattttatatttagttaaattaagttttataagtgaaggagaaataaaattttttatagataagagagtttgttttataagaggtttcgaaggaagtattaaatatggaaaggaaaaatttgtattagttattgtagaaatatattaaaatgtaaagatgattgatattatgaagaaattgtattaatgaatgggtaaaataattagttaataatataatgatagaattaaatttatatataataatattagttttaaatgtaaataggttaaatgttttaattaaaagatatagattggtaaattggataaaagagttaagatttattagtgtgttgtatttaggagatttattttacgtgtaaagatatatataggtttaaaataaagggatggagggatatttattaagtaaatagaaagtaaagaaaagtaggggttgtaattttagtttttgataaatagattttaaattaataaagataaaaaatgataaagaaagatattatataatggtaaagggattattgtaataagaagagttaattattttaaatatatatgtatttaaaataggagtatttagatttataaagtaagtttttagagatttataaagagatatagatttttatataataatagtggaagatttaaatattttattgttaatattagatagattaatttgatagaaaattaataaggatattaaggatttgaatttagttttgggttaagcggatttaataaatatttatagaattttttattttgatagaatatatattttttttagtattatatagtatttattttaaaatagaatatataattggaagtaaaatattttttagtaagtgtaaaagaatagaaattataatagttttttagattatagtgtaattaaattagaatttaggattaagaaatttatttaaaattgtataattatatggaaattgaataatttgtttttgaatgattattgggtaaataataaagttaaggtagaaataaataagttttttgaaattaatgggaataaagatataacgtattagaatttttgggatacggtaaaagtagtgtttagagggaaatttatagtattaaatgtttatattagaaagtgggaaagatttaaaattgatattttaatattataattaaaagaattagagaagtaagagtaaataaattcgaaagttaatagaagataagaaataattaagattagagtagaattgaaggagatagagatataaaaaattttgtaaaaaattaatgaatttaggtgttggttttttgaaaagattaataaaatagatagattgttagttagattaataaaaaagaaaagagagaagaattaaatagatataataaaaaatgataaaggggatattattattgattttatagaaatataaattgttattagagaatacgataaatatttttatgtaaataaattagaaaatttagaagaaatggataaatttttagatatatatatttttttaagattaaattaggaagaagttgaatttttgaatagattaataacgagttttgaaattgaggtagtaattgatagtttattaattaaaaaaagtataggattagatggatttatagtcgaattttattagaggtataaagaggagttggtattattttttttgaaattattttaattaatagaaaaagagggatttttttttaatttattttatgaggttagtattattttgatattaaaatttggtaaagataaaataataataataataaaggaaatttttggttaatatttttgatgaatattattgtaaaaatttttaataaaatattggtaaattaaatttagtagtatattaaaaagtttatttatggttttatttttgggatgtaaggttgatttaatatatgtaagttaataaatgtaatttattatataaatagaattaatgataaaaattatatgattattttaatagatgtagaaaaggttttcgataaaatttaataatattttatgttaaaaatatttaataaattagtattgatggaatatattttaaaataataagagttgtttatgataaatttatagttaaaattatattgaatgagtaaaagttgaaagtaatttttgttaagaaatgataatatgttgtgtaattaatatattgattggtgaatattgtgaaatttattttttatatttttttattaaaaaaatatgtatttaatattgtgttaggtttttttgtatattatttttattttattagttttatttttgattttagttattattatagtagttagttgtatttaggttttgtttagtttaagacggtataatttgatagtattttattttgtttattatgtatattttattttttttgtatcggggattttttgatgttgaggtataagaaggattagtttattatttaggtacgtataatttggaagtttggataagtagtttttattatatttgagtttatgttaatgaagtgatttttggaaagttttagggatgagaattggttgttatgggagttaattatgaaaggattggaaattttagtttttatttttaaattttagggaggggagagaggttggagattgatttgattattaatggttaatgatttaattaattatgtttatgtaataaattttttataaaaatttaatagaatggggtttagagagtttttaggttggtgaatttggaatagtgtttagtggaggtattgagaggatggtatatttggagaggatatagaagttttaaatttattttttatgtttttttttatgtattttattgatttggttgtttttgagttgtatgttttataatataattttgtaagtaaattgtttttttgagttttgagagttattttagtaattatggaatttgaggagggggttttgggaaattttgatgtgtagttaagttaaatagaagttgtgggtaatttggggatttattatttgagattggtatttgaagtgttgttagttttacgggatcgagtttttaatttgtgtggtttatgttaatattaggtagttttagaagtgaagtattgagaatagtagtagagaataaatgggagtttttttttgaaggaataataagattttggttatatttttggaattagggttaaaaatatttattaatgaattagatatggggtatgagataaatagaggagttaaggatatttttagatattggacgaggattattttttttttagagattaagcgtagggttgagaaggaaggtaggttattttaataaggcgatattttagtttttatgtgtttatttttgttttatattttttttattatattttagagtagtttagtttatgttagataattatgttgtgtgagtatatattatgggttgtatattacgggatgtcgtatgagttgtgtttattagtagagattatagttttataagttgaagtgttttttttggtggttttatgtgtataggttatttgagtatttgaaggtggttagtttttgaggaaaaaaaattttattgtttagaggatgaatgaattttttagagggaagtatttattataaagtatttgttttttttgtttgtatttattggaataattcgggaagtttataaggatagtttaagttatttttgtcgtttattttttattgtatttttagttttgttttttttttagaaagagtttgttaattattataagttaaaaaatagtattttgatttttgttttgtaatttttttttttttttataaatataagggtagaattggtatttcgagaagttaggaagtagtgagtttaggagttttcggttagttttgtttgtttattaggaggatgaaggttttcgtggttgtttttttttgttttatgtttgttattgtttttggattttaggttcgggttataaaaggtgagtttagtgagtttttttttagatgattaggtttatggtaatttaagttttgtggtagagatatattgtttttttgtaattattttttattttagacgtggttatggtatttatttaaaagtagtattagagtatagatttggttttgtttgtaggttttggattttgggaggggaatatatatatatggttggtttaatgtggggttaattatttttttttttatagtaaaaattatttgatatttttttttagtagatataggattattaagtgttagattaaaagaagtgtagtaaaattataaatttgtagaaagaagtatagaattgtatgatgttaaaattgttatatattatttagtagtatttattatattattttggagaagaaatggaataagttatataaatgatttaattaaggttatttaattatcgtatttttttgtttaataaatgtatttttagtattttttatgtatagggtaggtattgttttaagtgttttatagatattaatatattagttttatttaataattttgtgggatatgtattagattttaaaaaatgtaaattttttatttttgtagggaagaaataaaatattaatttttatatggttttttatattattattattgatattttataaatgagaaaattgaggtatagaattttagataatttggtagattatataattattaagcggtggaattaaaatatgagttaattaggaagtagttatggaacgataaggttatttaagattttttttttattttatttaaattatattgagtatattaaaatatatttatatgttttattatatataatttatttaatgtaattatataagaaataagttgaaaatattggaaagtaattgggggattaattcggtagttgaatcgttattgttaagtttttatgttttaaaatgttaagtaaatattaattttaaagttagttttaaaattattaatagtatatttaatataattgttaaattatattaaatgtatagttattaaattatattaaaagtatatttaatatttttattaaattatattaaaagatatttaatatagttattaaattatattaaaagtatatttatttttaaatatatgaaaagtatatatatattatattaaaagatatatgtatatgtatttttattgtagtattaattataatagtaaagatttgaaattaatttaaatgtttattaatgatagattggataaagataatgtggtatatatatattatggaatattatgtagttataaaaagaaatgaatttatgttttttgtagggatatggataaagtcggaaattattatttttagtaaattaatatagaaatagaaagttaaatattatatgtttttattcgtaagtgggagttgaatattgagaatgtatggatatagggaggggaatattatatattggggtttatcggggagtggagggtaaaaggagggagagtattaggataaatatttggtgtatgtagtagttttagatgatgggttgataggtatagtaaattattatggtatatgtatatttatgtaatgaatttgcgcgtttagtataggtatattagaatttaaagttaaataaaatttaatttaatttaattttaaaaaaagaaaaagtttatttaatagttattatattatatttaaaatatatttaatagttattaaattatattaaaagtaaatatttattatattttattttattttgagttggagttttattttgtggtttaggttggagtatagtggtattattttggtttattgtaatttttattttttgggtttaaacgatttttttgttttagtttttttagtagttgcgattataggtatatgttattatgtttagttaatttttgtattttttttttttagtagagacgggattttaatatgttggttaggttggttttaaatttttgattttaagtgattcgttcgttttggttttttaaagtgttgggattataggcgtgagttatcgtattcggttaaattttaaggttagttttattttgtgagatagttaattgtggaaataaattaattttaaggattaaaatttaaaagaaaggaaaaatgtttaaagtttagttttatttgtttaataagtataaggtagttttataattttatttttaaagtatttggcgttagatgaattttggaatgtagaattttttaggttttaaaaagttaatatgatatgatgtagtaattttatttttgggtatatatttaaaataatttaaagtaggtatatgaattgatttttatatatttatatttatagtagtattattgatgacggtagttaaaaagtagaagtaaattaagtgtttattaaaaggttagtagataaataaagtgtggtttatatatataatggaatttatttggttttaaaaagtaaggagatttttttgaatgttgaagtaagaaaaaataaaaatttaagtaaggagattttgatatatgttataatatggataaatattaaggatattatgttaagtgaaataaattagttataaaaggataaatagtgtatgattttatttatatgaggtatttagttaaatttatagagatacgatatagatagtgattgttagggattaaggggaggaagtatgaggagttgttgtttaatgaatatagagttttagttttataaaatgaatgaacggtcgtgaaaattgtatagttatttgagtgtatttgatgttattgaattgtatatttaaaatagtttaaatggtaaattttacgttatatatatatatatataattacgatttaaaaatgatttagtaaaaaatttaaatatatattgatggtatttatttttgatgaggtttgggaatagtattttaattaaatatagtaattttttgtaataaatatatgaatatttttattaattgggataaataatgattataatagttgtattttatttaaagggatattgtgttattatatgagttgatgaatatttttttgtttttagagttttgtggattttagaaatgtgtagagagatttgtagattgtgttatattatgtagatattttattaattgaattatgttagattttgaggttttttttagtattttagagttaatatagtgtttttatgtttatatttttaaaaggtttttgaaaaattttagggttttaaaggaataaatgggttaggagttaggtttagagtttagataggtggtggtggtttagttttagggatttttttgttttaggaggaggatgagtaatggggtgggtggagatgttgaaataatgttgtcgtttagtgatttttttttttgttttgtttgttttttttaga

SEQ ID NO: 2202 - DNA, 8576 bp, Artificial Sequence
  chemically treated genomic DNA (Homo sapiens)
tttggaagaagtagataggatagggaaggaaattattgggcggtagtattgttttagtatttttatttattttattgtttattttttttttgaggtagaaaggtttttgaagttggattattattatttgtttgggttttaggtttgatttttggtttatttatttttttagggttttgagattttttagggattttttgaaaatgtagatatgaaaatattgtgttgattttgaaatattaaaagaaattttaaaatttaatatggtttagttaatggaatgtttatatgatgtgatatagtttataagtttttttatatatttttggaatttatagggttttggaaatagagaggtgtttattagtttatatggtggtatagtatttttttaagtgaagtgtagttattatggttattatttattttagttagtagaaatatttatgtgtttgttataggaggttgttgtgtttgattaaaatattgtttttaggttttattagggataagtattattaatatatgtttaagttttttattaaattatttttaaatcgtggttatatatatatatatataacgtaaaatttgttatttgaattattttaagtatatagtttaatagtattaaatatatttaaataattatgtagtttttacggtcgtttatttattttgtgaaattgaaattttgtatttattaaataataattttttatgttttttttttttaatttttgataattattatttgtgtcgtgtttttgtggatttgattaagtattttatgtgagtggaattatatattatttgtttttttgtgattggtttattttatttagtataatgtttttgatgtttatttatgttgtagtatgtgttagaatttttttatttaaatttttatttttttttattttaatatttaagggaatttttttattttttgaggttaaatagattttattgtatgtatgaattatattttgtttatttattaattttttgatgggtatttagtttgtttttattttttggttatcgttattaataatgttgttatgaatatgggtgtataaaaattaatttatgtatttgttttgaattattttggatatatatttagaaatagaattgttgtattatattatattaattttttaaaatttgagaaattttgtattttaaaatttatttagcgttaagtgttttggaaatgggattgtggagttgttttatgtttgttaggtaaatgaaattaagttttaaatatttttttttttttttaaattttaatttttaaagttagtttatttttataattgattgttttatagaataaagttagttttaaaatttggtcgggtgcggtggtttacgtttgtaattttagtattttgggaggttaaggcgggcggattatttgaggttaggagtttgagattagtttggttaatatgttgaaatttcgtttttattaaaaaaaaaaaatataaaaattagttaggtatggtggtatgtgtttgtaatcgtagttattagggaggttgaggtaggagaatcgtttgaatttaggaggtagaggttgtagtgagttaagatggtgttattgtattttagtttgggttatagaatgagattttaatttaaaataaaataaaatataataaatatttatttttaatataatttaataattattaaatatattttaaatataatgtaataattattaaatagattttttttttttttaaagttaaattaaattaaattttatttgattttaagttttggtatatttgtgttgaacgcgtaggtttattatataggtatatatgtgttatggtggtttgttgtatttattaatttattatttagggttgttgtatgtattaggtatttgttttaatgttttttttttttttattttttatttttcgataggttttagtgtgtgatgtttttttttttgtgtttatgtatttttagtgtttaatttttatttacgagtgagaatatgtggtgtttggttttttgtttttgtgttagtttgttgaggatgatggttttcggttttatttatgtttttgtaaaggatatgaatttatttttttttatggttgtatagtattttatggtgtatatgtgttatattgtttttatttagtttattattgatgggtatttgggttggttttaagtttttgttattgtgattagtgttgtaataaagatatatgtgtatgtgttttttaatataatatatgtgtattttttatatatttaaaaataaatatatttttaatataatttaatgattatattaaatattttttaatataatttaataaggatattaaatatatttttaatataatttaatgattatgtatttaatataatttaataattatattaaatatattattaataattttaaagttggttttaaagttgatatttatttaatattttgaaatataaagatttggtaataacgatttagttgtcgaattagttttttaattgttttttagtgtttttaatttattttttatatggttatattaaatgaattatatgtaatgagatatgtgggtatattttaatatgtttaatatggtttgggtaaggtaaaaaaaagattttaaatggttttgtcgttttataattattttttaattagtttatattttaattttatcgtttaatagttgtgtgatttattaagttatttaaggttttgtgttttagtttttttatttgtaaaatgttaataataataatatgaaaaattatataaaagttgatgttttgttttttttttataaaagtaaaaaatttgtattttttaaaatttaatatatattttatagggttgttaggtggaattgatgtgttaatatttgtaagatatttagaatagtgtttgttttgtatataggaagtattagaagtgtatttgttaaataaaaaaatacgatggttaggtgattttggttgagttatttgtgtggtttgttttattttttttttaaaatgatatgatagatattattagatggtatgtaatagttttagtattatataattttatgtttttttttataaatttgtaattttattatattttttttaatttagtatttaatagttttatgtttgttaagggaaggtattaaataatttttgttgtgaaaagggaaatgattggttttatattggattagttatatgtgtatattttttttttagggtttaaagtttgtagatagaattaggtttatattttggtgttgtttttaaatgagtattatgattacgtttgggatggagagtagttataggagggtaatgtgtttttgttatagagtttgagttattatgaatttggttatttgagagaaagtttattggatttattttttgtgattcgggtttgggatttaagggtagtaataagtatgaggtaggagagggtagttacggagatttttatttttttggtgggtaggtagggttggtcgaggatttttgggtttattgttttttggtttttcgggatgttagttttgtttttgtatttataagaagaagaggaagttatagggtagaggttagaatgttgttttttgatttatgatagttaataggttttttttaaaaaggaaataaggttgagaatgtaataggaagtagacgataaagatgatttggattgtttttgtggatttttcgagttgttttaataagtataggtagagagagtaaatattttatgatggatatttttttttgggagatttatttattttttaaatagtggagttttttttttttaggagttaattatttttagatgtttaaatagtttgtatatatggggttattagagagaatattttaatttgtagagttgtgatttttgttggtaaatatagtttatacgatatttcgtaatgtatagtttatgatgtgtatttatatagtatgattgtttagtataagttgagttattttagaatataatggggagagtgtagggtaaggatgagtatatgggagttaaaatgtcgttttgttggggtagtttgtttttttttttagttttgcgtttagtttttgggaaaggaatagttttcgtttagtgtttggagatatttttgatttttttgtttattttatattttatatttaatttattaataagtatttttggttttaattttaaaaatatagttagaattttattatttttttaaaagaaaatttttatttattttttattattatttttaatgttttatttttgagattatttggtgttagtatagattatataggttaagggttcggtttcgtgaggttggtaatattttagatgttaattttaaatagtgggtttttaggttatttataatttttgtttgatttggttatatattagaattttttaagattttttttttagattttataattattaaagtagtttttagaatttagaagaatagtttatttatagggttatattataaagtatataatttaggaatagttaggttaatgagatgtatagggaaaggtatggggagtgggtttggagtttttgtgttttttttaggtgtattatttttttagtgtttttattgaatattgttttaagtttattaatttggaaattttttaaattttattttgttaggtttttatggaagatttattatataagtatgattgattaaattattaattattagtaattagattaatttttagttttttttttttttttggagtttaggggtagaggttgaaatttttaatttttttatggttggtttttatggtaattagtttttatttttaaggttttttaaaagttattttattgatataaatttaggtgtggtaggaattatttgtttagatttttaggttgtacgtgtttgagtaatgagttgattttttttatattttagtattagagaattttcggtgtaggaaaagtggggtgtgtatgatggataaggtgaggtgttgttagattatatcgttttgagttgggtagagtttgggtgtaattggttgttgtagtggtggttagagttagagataaagttgatagaatggaagtggtgtatagaggagtttgatatagtattagatgtatatttttttagtgaaagaatataaggaatagattttataatatttattaattagtatgttgattatataatatattgttattttttgatagggattgtttttagtttttgtttatttagtatgattttggttgtgggtttgttataaatagtttttattattttgagatatgttttattaatgttagtttattgagtgtttttagtatgaagtgttgttgaattttatcgaagattttttttgtatttattgagataattatgtggtttttgttattggttttgtttatgtgatggattatatttattgatttgtatatgttgaattagttttgtattttagggatgaagttatggataagttttttaatgtgttgttggatttggtttgttagtattttattgaggatttttgtaatgatgtttattagggatattggttagaaattttttttgttgttgttgttgttttgtttttgttaggttttggtattaggatgatgttggttttataaaatgagttagggaggagtttttttttttttgttgattggaataattttagaaggaatggtattagtttttttttgtatttttggtagaattcggttgtgaatttatttggttttgtgttttttttggttggtaggttattaattattgttttaattttagaattcgttattggtttatttagggatttaatttttttttggtttagttttgggagggtgtatgtgtttaggaatttatttattttttttagattttttggtttatttgtatagaggtgtttatcgtattttttgatggtagtttgtatttttgtgggattagtggtgatattttttttattattttttattgtgtttatttgatttttttttttttttttttttattagtttggttagtagtttatttattttgttaatttttttaaaaaattagtatttggatttattgattttttgtagggttttttgtgtttttattttttttagttttgttttgattttagttattttttgttttttgttagttttcgaatttgtttgtttttgtttttttagtttttttaattgtgatgttagggtgttaattttggattttttttattttttaatgtggatatttagtgttataaatttttttttaaatattatttttgtcgtgttttagagattttggtacgttgtgtttttgtttttattggttttaaagaatttatttatttttgttttaattttgttgtttatttagtagttatttaggagtaggttgtttagtttttatgtagttgtgtagttttgagtgagttttttaattttgagttttaatttgattgtattgtggtttgagagattgttatgatttttgtttttttgtatttgttgaggagtgttttatttttaattatgtgttttattttagaataagtgttatgtggtgttgagaagaatgtatattttgttagggtggagagttttgtagatatttattaggttcgtttggtttagagttgagtttaagtttttaatatttttattaattttttgttaagttgatttgtttaatattgatagtgaggtgtttaagttttttattattattgtgtgggagtttatgtttttttgtaggtttttaagaatttgttttataaatttgggtgtttttgttttgggtgtatatatatttaggatagttagttttttttgttgtagtgatttttttattattatgtaatgtttttttttgttattttttatttttgttggtttaaagtttatttattagagattaggattgtaatttttgtttttttttgttttttatttgtttggtaagtatttttttatttttttattttgagtttatgtgtgtttttgtacgtgagatggattttttgaatatagtatattgatgggttttgatttttttatttaatttgttagtttgtgttttttaattggggtatttagtttgtttatatttaaggttaatattgttatgtgtgaatttgattttgttattatgttgttagttggttattttgtttatttattgatgtagtttttttatagtgttaattatttttatattttggtatgtttttgtagtgattggtataggttttttttttttatatttagtgtttttttcgggattttttgtaaggtaggtttttttgtttgtaaaggattttattttttttttatttatgaagtttagtttggttggatatgaaattttgggttgaaaatttttttttttaagaatgttgaattggtttttatttttttttggtttgtagggtttttttagagagatttattgttagtttgatgggtttttttttgtgggtaattagatttttttttttggttttttttaatattttttttttttattttaattttggagaatttgatgattttgtgttttggggttgtttttttcgaggagtatttttgtggtgttttttgtattttttgaatttgaatgttggtttgttttgttaggttggggaagtttttttggttttttgaagtgtattttttaatttggttttatttttttcgttatttttaggtatataaattaaatgtaggtttggtttttttatatagttttatattttttggaggttttgtttatttttttttatttttttttttttaattttgtttttatgttttattttattaaggtgatttttagtttttgatatttttttttttgtttgattaattcggttattgatatttgtgtatgttttacgaagttttcgtgttgtgttttttagttttattagattatttatgtttttttttaaattggttattttagttagtagtttttgtaattttttattaaggtttttagtttttttgtattgggttataatatgtttttttagtttggaggagtttgttagtatttattttttgaagtttatttttgtcgatttattaaatttattttttatttagttttgtttttttgttggcgaggagttgtgattttttggaggagaagaggtattttggtttttggaatttttagtttttttgtaaaggtttttttttattttcgtggatttatttatttttggtttttgacgttggtgatttttagatggggtttttgtgtgggtattttttttgttgatgttgatgttattgttttttgtttgttagttttttttttaatagttaggttatttttttgtaggtttgttggagtttgttttaggttttttttagattttgtttgtttgggtattattgatggaggttgtagaatagtaaagattgttgtttgtttttttttttgaaagttttatttaagaggggtattcgttagatgttagtcggagtttttttgtatgaggtgtttg

SEQ ID NO: 2203 - DNA, 15416 bp, Artificial Sequence
  chemically treated genomic DNA (Homo sapiens)
tttcgggtttaagtaatttttttggtatttagttttttgagtagtcgggattataggtatgcgttattatatttagttaatttttgtatttttagtagagatagggtttcgttatgttggttaggttggttttaaatatttgattttaagtaatttgtttgttttggttttttaaagcgttgggattataggcgtgaattattatatttagtttgatatttgtttataggttttttttttgatgtaaaatttatatataatgaaatgtataaatttttagtatatatttgttgtattttgataagtgtttatttttgtgtgatttaaatttttattaaggtatagaatatgatcgttattttagaaagttttttttttttttttttagttaatttttaagtttttttttttgtattttatttgtttatttttttttattattattattttaaattatttatttattttttgagatggaatttttttttgttttttaggttggagagtagtggtacgattttggtttattgtaattttcgttttttgggtttaagtgatttttttgttttagttttttgagtcgttgggattataggtatgcgttattatgttcggttaatttttgtttttttagtagagatggggtttcgcgatgttgtttattttggttttgaatttttgattttaggtgatttatttattttggttttttaaagtgttagaattataggtatgagttattgtgtttagttttttttttttttgttttagtgaagttagagtaatagaatatagagtatgtggataggttgtgggtgtagtttttgtagaatagaattttatattttcgtaatatgtttgtatttggttagattatggtatttattagtataaatggtagtatggtatttattttttgtaatgatttagagtgaggtatttttatttttttatttttataaataatgttgttatgaatatttttttataaatttttatatatatgtatgattattaatagttaaaatagtaatattggttaggtgcggtggtttacgtttgtaattttagtattttgggagattaaggcgggtggattattagaggttaggagtttaagataagtttgggtaatatggtgaaattttatttttattaaaattataaaaaattagttgggtatggtgatgtgcgtttgtagtgttatttgtttgggaggttaagttatgagaataacgtgaatttggaggtaggggttgtagtgagttgagattatgttattgtattttagtttgggtaatagagtaagattttgttttaaaaaaaaaaattagtaatatttttttttatttgaattagatgaaattttggttttttaatggtatgaattggttaaagttttttataggttttgtatttttaattaaatttagtgttcgaatgatatttagaaatttgtatagtttgtagttttttgtttgaagaggtaatattcgttattgggtggtttggttttgagtttttggtaatttgagggtgggcgttttgtttaaagataattgttaaggttatatggaatatttggtgattgttttatttaaatagaggtgtttgattttgttttttttttagaggttgaaattggggttttaaggtgaaatttagttgtaaattattttttttttatttggaatgtgaaatgaaaaatgtatttttgaggttgggtgtagtggtttatttttgtaattttagtattttgggaggttgaggtaggtagattatttaaggtcgggagttcgagattagtttgaataatatggtgaaatttcgtttttattaaaagtaaaaaattaattaggtgtggtggtatatgtttgtaattttagttattcgggaggttgaggtaggagaattatttgtgtttaggaagcggaggttgtagtgagtcgagatcgcgttattgtattttagtttgggtaataagagcgaaatattattttaaaaaaaaaaaaaaatgtatttttagtttaattattgatatatgtattataaaaaataagtaagttagattttttaataaaggttttttaagtaaggaatatatagacgttattttttttttgtagttttttttaggatgggggattttgatattgttatatattttttttagaaattattttaatttgttatttttatttattttagtgggaagataaaattattatatggtagagttaggagttttaggtttatttggggatttttttaaggatattttataaatgtaaatttgttggttatttatatgtattgtttaattgttttttcgtttttttagtgattatgttagttattattattattattaaaaaggttaattttttttaagtaatttatttttttgaattgtgtattagtttgttaagggatgttatagtaaaagaattaataaataatataaatgtatttttttatagttatggaggttggaagtttaaggtgtaggtagagttggtgttttttgaggatatattttgtggtttgtagatgattatttttttttagttttgtgtgtttgtattttaatttttttataaagatattagttttattggattagggtttattcgtatgattttattttattttaaagattttatttttaaatatagttttattttgagatgttgggggttaggattttaatatgtaaatttggtgagggagtagaatataatttagtttataagaaattataaaatataaatatgtaagagaaatgtgagtataagaaaaagttaaaaagtttatatatagtttttttagttggaataaattaaagtgtttttttgtttttgttatatgtatatttaattattggtttttattagtttataatattaatagtaatgtaagtatatgttagttttattataaatttagaattaggtatttttaaaaataagattagttatatttttattgtattttttttttaatttagttttttaattttttttaatgaatttgttaggttgaaggtttttttatatatatataaatataattatatatatatatattttttttaatagatggagttttgttttgttatttaggttggagtgtagtggtataatttcggtttattgtaatttttgttttttaggtttaagcgatttttttgttttagtttttttagtagttgggattataggtatttgttattatatcggttaatttttgtttttttttgtatttttagtagagatagggttttattacgttggttaggttggttattaatttttgattttacgtaatttattcgttttggttttttaaagtgttgggattataggtgtgagttaatatttttagttttttttaatatatgttatttataatattggatgtgtgtgtgtgtgtgtgtgtgtgtgtgtgtgtgtgtgtgtgtttaaattaattttttagtagttgtttaatttgtagtgttgtttttaggatttttattaaaagaatatatattaaatttttattaaaggttagttatgatggtttataattaagatgttttaggagtaataagagttgggtgggttattgatttttagatgggaatttggttatgtttataagatttggatttgaagatattgggtagttaacgaggtttatggaggagaattttggcgggttttttattgaagtatatttatttgtttttatttttaatttgtttttaatgtttttttatttgatgtttacggttagttatttttaggatttgagttattaagatgatggatgaaattgggtttggaataagaaggtagggttattttgatttaggatatatttttaatatgttgtgaagaatttttagtattaaataatatttgggtggaagaagttttgggaaagaagtttagttgtagattatataatgtttttaaatgggagaaaatgtttagttttatggtttagattttttgggaagtaggataattggttattttattttaggtaaggttgtttggttagaaatttatgttttattatttcgagtatattatggttggtttataaatcgtagttttatagagaattttttttttttttagttattgtttttttaaaataaaagtttttgtgtaaagtaatggaagaaattttatattgttttttggggttgttattttatgtaatttataataatgattacggttcgttttatataagatgtaaaggatttgggagagggaatttagtgtgtatttaggggaagatggtgatgtagatagtatattttaggaggttgggaagtgtcgagtgtttaaatatatgttttttaaatttaatgggtatataaattatttggtggtattattaaaatgtaatttttaatttagtagttttgggatgggtttatggatagtattttggttagttttttttgggatttttttttttttttagagaagtgtagagggttggggtattgggtttaagaggagttttagattgtaattatagttttaggtaatttttttttggaagtgatgtgttagcgattggaggagaaagggatttttgggattttttttagttttattattttgatttggggttttgagattttaataaagtggatttttgggagttatagatttttatgggaatgatgaaagttgcgtatttttttttcgtataaatgtaggtttatttttaattttgtaaattattttaggtttcgcgggttcgtagttttggtttaagatagttgtttgttttataggtcgcgtatttagagtcgggcggttttgtagtttagtatttggttcgggttgcgcgtcgggttttggcgggggcgtgttaggaggcgtgttcggggcgtgtcggaggcggggttaaggcgggggtaagtttcgtttttcggtcgtgcgagaggtcgagtttgttgtattgtagtcgtcgcggcgtcgttcggttttttatttttaataatggcggtttcgagttcgagcggcggcggcggtttcgggggcggtagcggtagcggtattttcggtttcgtagggttttcggcgttaggttattcggtcgttagtagtatgtagggtaaggaacgcggtcgcgtcgagattttagttttttagcgcggtaattcgcgtcgtcgcggtttgttttagcggacgttttcggattcggttgaggaagttacggtagtcgtcggttttttttttttttttttttcggtttttcgtttcgttttcggtcgttttcggttcggtttggattcgggtttcggttcgtataggtttcggtcgcggtttttgtttgcgtttggtttttgggttttatcgggtttttagtaggttcgtagggtttatttggttcgggatcgttttcgcggtcgtttttatcgttttcgtcgtttatttggcgttcgttcggttttcgttttcgggaacgcgtcggttcggggttgcggcggagcgggaggggcgtcgggtttgttttttggtttttgacgtcgtttaggtaggcggcgaagatagcggtttcggtcggcgtttttcggtttcgtcgtcgtagtgggtttcgtttagggttattttggttgtcgtcgggtatagttggagtcggattatcgagttgatttcgggttacgggggttttttggaatttgcgtttttaaatttttgtagggtttttgtgcgttggaagggatgggggtggggggcgggttgtttaggtttgtgttatttgtaaggtaggtaggttgtattggtttgggagaggtattttgttttaggttagggatttttgtgttagtattgcgtgtaggaagaaaaaaaaaaaaaaaaaaaaagaagatttaatttggtttaaatggagagatataggaaatagataggggttaaagtgatattgtagtgtttggatatttgaggtagttttgttaattaatgattttttttattgggaatgtttattagttgtgtatggtttttgatagggggtgttgtgaaaatattaggttaggttcgagtttgttagggattatttttttaaatttattggggaattttgagtagtaatgttatttttaaaatagggaattttagaatttttttgataattttagtaaattgtttgtgttgaattattaatagaataagggttggggtatttttggtagttagtgtgattatggttattttttgattttattttttttaaagggtttttagtatttagttaggtttaatagatatttattgaatagtttatgtttatagagtatgttataatttagaaagaagagataggattttatttatttttatatttttgttattttttttatgaaataattttaatatatataaaaattagtgatagatatatagataggatgatgttagagtttagaggatattttttgtgtaggtttttagataatttatttaaattgaattagttattggatgtttattgtgttgtatagtatattatattgatgaagtataagattgattttttgattgtatagttttataatttaggtggtggtggttggggcgaaatgaaatggtaaaatgataatttaggattgtattttttgttttagatgggtgatttataaagtttataaaaataaggtgatttgtttgtttgttttattggtggggaggttgatagtttgaaatagttggatatagtgtgtttttttggtttaaaaaatatttattgagtatttgtataaaacgtttatgttgagtttatagagaattgaatatttttaattgtttttatggaggttatttttttgtgaagatgggggagggaaggttatttagttaaatatgaaaaattattagttggaaaagtaataaaggtaataagttgggttttgtgatagaagataatagagggtagttcgtttgataagatggttagagaaggtttgtttggaaagttaatttttttttatttgaagacggttttaggtagaggaattgtgtgtatgaaggttttaaagtagggaagagtttggagtgttttaggaatttttaaggtagtggttaggattttttttgatgttgttcgttttttttagtttttgtatgttgatatttagttaattaaattttttaataagtagaatttattttagaaggaaaaaggatttaagatttttttatgaattattgtcgaatttttttttttattaatattgtgtttagttttgattgatttaggaatgtgttatattttgtttttgaaattttttttattagttagaatgaagtgtttgatatttttaggatgttgtttagaatagtttgttataaagtttgaatttaagtagtaatttaggatttttttttttggtttgttttgttttgtattttaattgtgaggtttttgaagaggaaattttataagaatttaaaaagaaagatttttatttaattgtatgggagttatattttttatattgtattttatttgttaagggtttttttttgttttagattagattttatagagtgggttttagaagatgtttgatgtatttttatttttttttttttaatttaattatatttgttatttaaaaaattttttttttgggagttgttaatgattatgttttttgaaatagtaggatttagttgtggaatataaggaatgttttatgtagtagatattggatatttttttatgtggtaagtattgtggtgggtattggataattttgaatatttttttatggttttatgtttatggtttaagagtggtttaggttggttaatattgtttttttaatatattgtttaagaattagagttttggagttttgggtttgaattttttggttaggatttagatatgcgttttgtgattaggggtaatgaatttggtttttcgaagttttagttttttatttggaaagtgggaataacgtttattttttcggtggttttgagaatgtatgtaagtttgggatttgatatgtagtaaggatgtaatatatattagttattattgttagtagcgataatattgttatggttttattaatggttttttttattattggtaaatgagtttttaattttttattatttattatataatttttttagtttatattattaggttttattgttttttttaatttgttgatttttttattttttattattgagtagtttttttagagtattttagatgagattttattttattttaaatttcggatttgtttttttttggatttgaggatttttaaatgaattataatgtgaacgatatgaaatagaagtttagttattaatttgttttatttattttttttataggggatgggtagatggttggaatgggatttatagtgaatttgattataagagtaattaatagacgtagttttggttgtatgtttatgttaatagttatggtttttaatttggttatttttgttattgttttttagataatagggaatagttgttaattttgttattatttaaaagatttgagtgtttttatttattttgatttattttttttttatgtttatttataaatatatttaatttttatacgttgagtagtttttaggttttggttttttgatgattaaagttaataaaatgtagatttgtttgttaagttaggtaagtggttttatgaaagtatatttggtattaggatgagtttgtatttgagagaggaaataatatttaaattaattattttgagaaatgtttttatttttaatgttttattaataatttgttaatgtagatagatttaataggaaaattttttgtatattagggttttattttgtggaaaagtattattttttagtttaagaaattttagttaatttaaagtacggaattgatttgtagtatttaagaatttttttagttatggttagggtttttttttgtggtaaatttaaagtttcgtgattttagttgggttagtgtgaattttgtaaagagaagatttcgttatattaggtaattaattttagatatgtatagtaaatagtattagatagtatggttggtatgttagagaatagtatattttgattaatagagtttgttagttgagaatttaatagtttttataatgaaattgtataggtaggatgattttttttttagtagtagttgtagtagttagcgtttttatagtatgtagtaatgtttaagaaataaaaggatgttgaagtgtaaagagtattggatttagatttagaaaattatggttaaggtaattgttttgttgtttataaatattgagattttagggaaattttttaattttttttaattttttgtttagaaattttttatttgttaaaatagggataatgtttaatttgtagggttattgtaagaattatatttttaatgtatgtgaaagtgttttgaaaattatagaatatttataagtatatatagattgttattagatatgattatttgtttgttgtagttattaattatttaaaatgtaatagattttaaagatcgtttagttgagaaatgttagtttttaatagatgtttttttaaaatggttagaatagaatttataattgatttagaaaaatattgagttatttgtaaaatatttgttataagaaatagttagaaagtatatgttgtaggtgtttttgatttttttaaagttttgatttatagaaaattttgtgattagtcgagtttttagttatttatttttagttgagtatttttatgtattagtttaagtagaaagatgatagtttgattttgttttagaaaatacgtttagtattttaaaatgtaatgaagtatatttgttaagaaaaagttaagagatttaaaattaatgtagttattttttttaaaaatatttgaatataaaatgtatatgaaatgttttgtttttgattttgtttatttgtttttattaattagtttggttttcgagaattatgggagatttttattttaattttaaagaattgatttgtgtagatagtgaagagttttaaattttagaattgtttgttttttttagtgtgttgtataatattttttttattgtttaatataattttatataagtttattttagtaaattagtttttttttaaagtttagattgtatttttttttatgtttttttaaaaattagagtaattttagtattaaagtaaaaaagtggaaaaatattttattttatttttagaatatatatttttttatatttttttttaaaatattttattagtttgaatgtgtgttgaaatttgtttaagatgggatattagttaattttgtattttgagtcgtttttttttttcgtaaatttttttttttttattaatttgagaagttggattgatgtgagtttatagagtttttttatttttaggggtttggatattataattttaattttattttatataatcgaggttagttttttttgtagtttttaggaagtgtagatggttttaatgatataatttgagaaattttaattgaggtttaaaaaagaaagggaaagtaatagttaataattttttttattgtttttatttaatttgatgtttataattattttttaaaggtaagtggatatagttttttttatagatgagggggtagacgtttatttgtttcggaagaggtaggttttaattatttgggtgattggtagtttttgttttttttattattttattgtatggttttttgagtttttttaagttatttcggttatttaggtttgaaggaagtatttttgttagaagtgatgtagatttaggaatggaggagagagattattttaggttttagttagggggcggaagttttaagtaattagttattttttgagatgattttggagttttggtgttttaagaatggtgtattttatgttataatgttttaaatttgttggagggtttatagtggtattttgaatttggagatatttcgattgggaatttttaagtaagtagaagattttaattagaggaaattattgtagatttgaaaggtaatagaatttttttaatattatatataaaaggaatttatttgttataaaatttaataaatgttgtcgttttggttaaatttgtaatttgggtaaattattatttttgttagtggatgtgggttagtttttagttgtttttttttaattttagaaaatttttaggtgtttttttatgttcggtaaggttgggagtttaatgtgtatttaaattaatagaaagtatttaagtcgtaagattggttttgtttgtagttatatagtgaaagggagatgattagttagtagtttatataatttaaggtgggttttttgaatgaagaaaataattatattgtatgtagtttggttttttaagaataatatattattttttattacggagaaagaggattaaaatggatattatagtagttttttcgagttatattgtattttattttatttaaaattgtttaaatattgaaaaacgaggaattaagaaaagtgttgttagatatatatatttgaatatatatatatatatatagatattaaattgtttaaatatttaaaaaaagaggaattaagtaaagtgttattagatatatatatttgagatatatatatgttagatgtatatatatttgatatgtttatgtttatttattgtttggttttgttgaagaaattagtgatattaaggagtttttttgatgattttggtagtttttttgggatttggttatgtgtttgttatggggaagtatttatttttttggggttgttagagtttttaggatattaggttgtgtttaggaagggttgtggtagaggtgtagagggtggggtgtggatttttagggttgtttggagttttttttttttaatttttttaaggtgattgtgaatgaaaggagaaagattggttttgtgtaggttaagttggtttggtgagtattagaaagatagggaaggtgttataatcgttgtttttatgagggagagaataggaataatagtgtttgtgataataataatttgttttagtttaggtttttggttggatattttagatatatttttttatttaattattataaagtttttttgggtattattttattttttataaatgaggaaattgaggtttatagaagttagatatttgttcgaaggaatataattgtaagttattgttttagtgtattgtgttttattaaataggtttgagaaggtaatgtggtatttaattttgtggttaaagaataaataaggtggttattgtttaaagagagaaaaagagttggtattatgaggatatttgaatttaaaaagtgtggaagggatttgatgagtattttattaatttttgattggtggatgattttaataatttggaattgttaatttagggtggtttttttttgatagttttagaaagttgatataaggaaatttgaaagaaataaattattaggaaataaattttggggaatttgttttgagtataatgaaaatataaatttagggtaggtttagataacgttttatatgttagagttataatgatatattatgggtagttgtggtttaaggtatatgttagaattttgaagttggaagtttgaaggtgttagataaatagattttttatgtttgtgatagaggaaagattttgtagtacggttttatgggtatgatttagtaaggtagttttgattttttttatattagtgtgggtttatattgtagtttataatgtatttttagtagtgtaaaaatttagaatgtttagggaattagaagtaattattgaggagataggaaattatttatgttcggttttatattttttttgatttatattattaatttagaggaatgggaatggagataattataaaattttataatggttattatataagtaaaattagatttaggtatattgtttttaaatttttaagataatattttttatttaaaaatgataaaattaggatttaagtgaaatgattttagttttatagttggaattagaattttggttttttaatatattttattttgttttttattttatcgaatattatttgttttttgtttttataaatatttatatattttaaatagtcgtttattttattgtatttggtaagaatagtaaattgtaggttttaagttatggttatataaaagattttaaaattgaggtaagagggtgagaatgaggggtaaatgtgggaacgagggtaggagatacgtagagagaaaaaggaggaggaaaaatttttatgtagttttattttttttataggtttattagtattttgttttatgtattttgatattgatttattagtgttaagaattaagaatttaaatttttaaataaatattatttttgatatttattttaagatttaattaaatttgtttggggttaggaaaaatgaaaaagatttaaatttatttttatttgtaatggggaaaatataaatggaggattatgttaaattaagttttagggtatagatagtttatttagatataaaaaagtgaggtatatacgatttaaaatgtaattagttaattattaataggtttaacggattatttagtatttttagagataggatttaaagtaagtgaataggaagttagaatttcggagataagggagattttaaaaattgaatatattggttaggtgagatggtttatgtttataattttataattttgggaggttgaggtaggaggattgtttgagattagtttgggtaatatgttgggattttatttttataaaaataaaaaataaaaaattttaaaagttagttagatatagtggtttgtatttgttgagatgagaggattgtttgagtttaggagtttgaggttgtagtgagttatgattatgttattgtattttagtatgagcgatagtaagattttgtttttaaaaaaaaaaaagaaaaaaagaaaaattgaatatatgtgagtgaatattagtgaatattatattataattaagaatttgtattttgtaaagttgaggatattggaagttttttttattttttttttttattattttttttttgtgtaagattgttgtttgttttttttgtttatttttattttttgagtatgagttagtggagttatttggtatttttttaaatttgtattataagtattaattttttgatttttgtaggttttaaagatttagatagattaattaaaaacgttttttttttaatttaataatgttaagaaagttatagaattgttaaagaaaaggtgagttagtgtgttttagttaatttagattttgtttgttagtggattttgggcgagttattaagtatttttttagtgagaaataatgtggagagatggatgtttggatgagattttagaattcgtttatttggttattttataattagatataaagaataagtttatatttatgttttgaatattttaattttttttttattttttttgtagttatttatatagattttgtattggtgatagaattttaggttttgagaattttttaatatttaaattggcgtttagtttttaatgtgttagagtaattattggcgatattttgttatttttagttatatatattttaaaatttttaatatattatatatttattaagtaatgtaattttttttaatataattttatatatagatttaattgattttttttttatatattttataaatttgtttttttgtttttttcgttatttatattattattttgtttatttttttttttttttttttatttttttttttttgttatttagtaatagttaattagggtattttgttttaaagttgtttgttttttagttttttttttagttgtagtagaaggtgagttttatttttttttttttagtgggatgcggggaagatttgtttgttatttttagagaatttttttttttttgaatgtagttagtttattttgcgtggtaggaggttagtggtttttagttgtttaggtttgtaagatttatatatttttgtttttttttttgaattttgtttttattgtatatttggtggggtagtatattgatttttagtggtagagagattagggttagattttttaggtttgttttagtattttttttttatgaagtttttatttttatttttttttgtattgttatttttatgataaggtagttagtagtggattatttcggtggtgtattaaagatattttttatgttaaagtagttatattagtattttttagtttttgtattttatagatggtatttttttagaa

SEQ ID NO: 2204 - DNA, 15416 bp, Artificial Sequence
  chemically treated genomic DNA (Homo sapiens)
ttttaagaagatgttatttataaagtataaaaattgaaaaatgttaatgtagttattttgatatgaaaagtgtttttggtgtattatcgaagtaatttattgttgattattttattatagaaatgataatgtaggaagaagtgagaatggagattttatgggaaagaagtattagggtaaatttagaaggtttgattttggtttttttattattgaaggttaatatgttattttattaaatgtgtagtgggaatagaatttagaaagaaaaatagagatgtatgggttttataagtttaagtaattaaaagttattggttttttattacgtaaaatgagttgattatatttaggaagaaaagggttttttggaagtagtaggtaagtttttttcgtattttattggaaaagggaaggtaaaatttattttttattataattggagaggaggttgggaaataaataattttaaagtaaaatattttgattgattgttattaggtagtaaaaagaaagaggtgaaaaggagagagaagaggtgaataaaatagtaatatggatggcgaaaggagtaagaaaataaatttgtaaggtatatgaaaaagaaattagttggatttatatgtaaggttgtgttaaaaaaagttatattgtttaataagtgtataatatattaaaaattttaaggtatatgtgattgagaatgatagaatgtcgttaatgattgttttaatatattaaaagttaagcgttagtttaagtgttaaaaaatttttaaaatttgaaattttgttattagtatagaatttatataagtagttataaaggaggtgggaaggggattaaaatgtttaaagtataagtatagatttgttttttgtatttaattatgaagtgattaggtgaacgaattttggggttttatttaaatatttatttttttatattattttttattaagaaaatatttggtaattcgtttagagtttattgataagtaaggtttaaattaattggaatatattggtttattttttttttagtaattttgtaatttttttaatattattaaattagggaagaagcgtttttagttagtttgtttaaatttttaagatttgtaaaagttagaaagttagtgtttatagtgtagatttgggaaagtattaaatagttttattagtttatatttaaagggtaaggatgggtaaaggggataagtaatagttttgtataagagaaagatggtgggaaggaaaaatgaggaaaatttttaatatttttaattttataaaatgtaagtttttagttatgatataatatttattagtatttatttatatatgtttaattttttttttttttttttttttttttagagatagggttttgttgtcgtttatgttggagtgtagtggtatgattatagtttattgtagttttaaatttttgggtttaagtaatttttttattttagtaggtgtaagttattatgtttggttaatttttggagttttttgttttttgtttttgtagagatggagttttaatatgttgtttaggttagttttaaataatttttttgttttagttttttaaagttatgggattataggtatgagttattttatttggttaatatgtttaatttttgaagttttttttgttttcgaaattttgattttttatttatttattttaagttttatttttggaggtattagataattcgttgaatttgttgatagttaattggttatattttaagtcgtgtgtgttttatttttttatatttgggtgaattatttgtattttggggtttaatttgatatgattttttatttatattttttttattataagtaggggtaaatttgagttttttttattttttttggttttaggtaagtttaattaaattttagaataaatattaagaataatatttatttaagaatttaaatttttaatttttgatattgatgaattaatattaaaatgtataggatagaatgttagtaagtttataaaagaaataaagttatatgagggttttttttttttttttttttttttacgtattttttattttcgtttttatatttgttttttatttttatttttttattttaattttaagattttttatgtggttataatttgaaatttataatttattgtttttattaaatatagtgaggtaagcggttgtttaggatgtgtaagtgtttataaaaataaaaagtaaatggtgttcgataaagtaaaaaataaaatgaagtgtgttaggagattagagttttagttttaattgtgaaattgaagttattttatttgagttttagttttgttatttttaaataaagaatattattttaagggtttgaaaatagtgtgtttaaatttaattttgtttgtgtaatggttattatgaggttttgtagttatttttatttttatttttttaggttgataatataaattagagagggtgtggggtcggatataagtggttttttatttttttagtagttgtttttgattttttggatattttggatttttgtattgttgaaagtgtattatgaattataatatgaatttatattaatgtaaagaaaattagagttgttttattgggttatgtttataagatcgtgttataaagttttttttttgttataagtatgaagggtttatttgtttgatatttttaaatttttaattttaaaattttggtatgtgttttaaattatagttatttatagtatattattatggttttaatatgtaaggcgttatttaaatttattttaaatttgtatttttattgtatttagagtaagttttttaagatttattttttgatggtttattttttttagatttttttatgttaattttttgaaattattaaaagggagttattttaagttagtaattttaggttgttagaattatttattagttaggagttgataaaatatttattaaattttttttatattttttaaatttaagtgtttttataatgttagttttttttttttttttgggtaatgattattttatttattttttggttataaaattaaatgttatattatttttttaagtttgtttaatgaagtatagtatattgagatagtaatttataattatgttttttcgggtaagtatttaatttttatgagttttaatttttttatttgtgaaaaataaaataatatttaaaagagttttgtgatgattaaatgggaaaatatatttaaaatgtttaattaaaagtttggattaaagtaggttattattattataggtattattatttttgtttttttttttatgggagtaacgattatggtattttttttatttttttggtgtttattagattagtttaatttatataaaattagtttttttttttttatttatagttattttgagagaattaaaagggaaggattttaaatagttttggagatttatattttattttttatatttttgttataattttttttaggtatagtttggtattttgaggattttaataattttaaaaagatggatgtttttttatgataggtatataattagattttagggaaattgttaaaattattaggggagttttttaatgttattgatttttttagtaaagttaggtaataaatagatataggtatgttagatatatatatatttgatatatatatattttagatatatatgtttggtaatattttgtttgatttttttttttttaaatgtttgaataatttggtgtttgtgtgtgtgtgtgtatgtttagatatatatgtttggtaatattttttttgatttttcgttttttaatgtttgagtaattttgggtaaaatgaaatataatatagttcgaaaaagttgttgtgatgtttattttaatttttttttttcgtggtggagaataatgtgttgtttttaaagaattaagttgtatataatgtaattgttttttttatttaaaaggtttattttgagttgtgtaaattattggttaattattttttttttattgtgtagttataagtaaggttagttttacgatttgaatattttttattaatttaagtatatattaaatttttaattttatcgagtatgaagagatatttgaagattttttagagttgggaggaaatagttagaagttaatttatatttattagtaaaaatagtaatttgtttagattataaatttagttagaacgataatatttgttaaattttatgataaatgagttttttttatatatagtgttaaaaggattttattattttttaaatttgtaatggttttttttaattaaagttttttatttatttggagatttttaatcgaaatgtttttagatttaaaatgttattgtaaattttttagtaagtttagaatattgtaatatgaagtgtattatttttggagtattaaggttttaaaattattttaaaaggtggttggttgtttggagttttcgttttttgattgaaatttaaaataattttttttttttatttttgaatttgtattatttttggtaaagatgttttttttagatttgaatggtcgaaatgatttaaagaggtttagagaattatgtagtagagtagtaagaggagtaaaggttattagttatttaggtggttaaaatttatttttttcggaataaataaacgtttatttttttatttatgaaggggattatgtttatttatttttaaagggtggttgtgagtattaaattaggtaggaatagtgaaaaaagttgttaattgttatttttttttttttttttaagttttaattaaagttttttaggttgtattattggagttatttgtattttttagagattataaaggagattgatttcgattatgtagaatggagttaggattatgatatttagatttttaaaaataaggaaattttatgggtttatattaatttagttttttaaattagtgaaagaagaaaaatttacgaaaaaagaaaacgatttaaaatatagggttaattaatattttattttaaataagttttagtatatatttaggttagtaaggtattttaaaggaaaatgtgagaaaatatgtattttaaaagtgaggtgagatgtttttttatttttttattttaatattagggttgttttaatttttaagggaatataagaagaaatgtagtttgagttttgaggggggattaatttgttgaggtgaatttgtatgaggttatgttaaatagtaaaagaaatgttatgtaatatattgggaagggtaagtagttttggggtttgaaattttttattgtttgtataaattagttttttaaaattaagataaaggttttttatggttttcgaaaattagattaattagtaaaaatagataaataaaattaaaagtaggatattttatatatattttatatttaaatatttttgggagaaataattatattgattttaaattttttgatttttttttaatagatatattttattatattttaaagtattgggcgtgttttttaaagtagaattaagttattatttttttatttaaattgatatataaaaatgtttagttaagggtaaatagttaaggattcgattggttataaagttttttgtaaattagaattttaagagaattagaggtatttataatatatattttttaattattttttgtaataagtattttataaatggtttaatgtttttttgaattaattatagattttattttaattattttaagaaaatatttattgaaaattgatattttttagttaagcgatttttgaaatttattatattttaagtgattagtagttatagtaggtaaataattatgtttaataataatttgtatatatttatagatattttataatttttaaagtatttttatatgtattaagaatgtgatttttataatggttttataggttaggtattatttttattttaatagatgagaaatttttgaatagagagttgagaaaagttagggaatttttttaaaattttagtgtttgtaaatagtagagtagttattttaattatggttttttgagtttaagtttagtgttttttatattttaatatttttttgttttttaaatattattatatgttatgggaacgttagttgttatagttattattggaaaaggaattattttgtttatgtaattttattatagaagttgttgaatttttaattggtaagttttattaattagaatatgttattttttaatatgttaattatattatttagtattatttgttatatatatttaagattaattatttggtataacgggattttttttttataggatttatattaatttagttaaagttacgaggttttagatttgttataagggaaagttttagttatggttaggaaggtttttgaatgttataagttaatttcgtattttaggttggttaaaattttttggattaaagaataatatttttttatagaatgaggttttaatatgtaagaaatttttttattaaatttatttatattaataaattattgatgaaatattaagaataaaaatattttttagagtagttaatttgagtattgtttttttttttaaatgtaaatttattttaatgttaaatatatttttataaaattatttatttaatttggtaaatagatttatattttgttagttttagttattaaagaattaaagtttaagaattatttaacgtataaaggttgggtgtgtttgtgaatgaatatgaaaaaaaaatgagttagaatgagtgaagatatttaaattttttgagtaataataaaattagtagttattttttattatttgagggatagtggtaaaaatggttagattagaagttataattgttagtataaatatgtaattaaagttacgtttgttgattatttttataattaaatttattataaattttattttaattatttatttattttttatgaaaaaaatgagtagagtaaattgatagttagatttttgttttatatcgtttatattgtaatttatttgagagtttttagatttagaaaaaaatagattcggagtttgaagtagaataaaattttatttaggatattttgaaaggattgtttaataatgaaaagtggggaaattaataggttagagagaatagtgggatttagtaatatgaattaaagaaattgtgtggtaaataatgagaggttagggatttatttattaatagtaaaagggattattaatgagattataataatattgtcgttattaataatgatggttaatgtgtattgtatttttattatatgttaggttttaggtttatatgtatttttaaagttatcggggaggtaagcgttatttttattttttaagtgagaaattgaggtttcgaaaggttaagtttattgtttttggttataaaacgtatatttgaattttggttaagagatttaaatttagaattttagagttttggtttttaagtagtatattaagaaagtaatattggttagtttggattatttttgggttataaatatgaagttatgaaaaagtatttaaggttatttagtgtttattatagtgtttattatataagaggatgtttaatgtttattgtatgaaatattttttatgttttataattgaattttgttgttttagagagtatggttattaataatttttagaaaggaagttttttgagtggtaagtataattagattgggggagaaggaatggaagtatattaaatattttttaaggtttattttgtgaagtttgatttaaagtaaaagaagatttttggtagatgaagtatagtatgggaggtgtgatttttatataattggatgggaatttttttttttgggtttttataagattttttttttaagggttttataattaagatatagaataaaataaattaaaaagaaggattttaaattgttgtttaagtttaagttttataatagattgttttagataatattttgagaatattaagtattttattttgattaatgaaaaaagttttaagaataagatataatatatttttgaattaattaagattagatataatattgataaaaaagaaaattcggtaataatttatagagaggttttaggttttttttttttttaaaatgggttttgtttattagaaagtttagttaattgggtattaatatataagggttgaggagaacggatagtattagaaaaagttttaattattgttttaggagtttttagaatattttaagtttttttttgttttggaatttttatatatatagtttttttgtttagaatcgtttttaggtaaaagagggttagttttttagataagttttttttgattattttattaagcggattgttttttattattttttattataaaatttagtttgttatttttattatttttttaattagtaattttttatgtttagttaaatagtttttttttttttatttttatagggggataatttttatgaggatagttagagatgtttaattttttataaatttagtatgagcgttttatgtagatgtttaataaatattttttgaattaaaaaaatatattgtatttagttattttaaattgttagtttttttattaataaaataaataaataaattattttgtttttataagttttgtaagttatttatttggaataagaaatataattttaaattgttattttgttattttatttcgttttaattattattatttaaattgtaaagttgtatagttaggaagttaattttatattttattagtataatgtgttgtgtaatatagtgggtatttaataattaatttaatttgaatgaattatttgagggtttgtatagaaagtgttttttaagttttgatattattttgtttatatatttattattggtttttatgtatattaaaattattttatggggagggtgatagggatgtaaagataaataaaattttgttttttttttttgaattatggtatgttttataaatatgaattatttaataaatgtttgttgaatttaattaaatgttagaagttttttaagaggaatggaattaaaaagtaattatggttatattgattattaagggtattttaatttttattttgttaataatttaatataagtagtttgttaaagttgttaagagagttttgagattttttgttttaaaaatagtattattatttaaaattttttagtaaatttaaggaaatggtttttaataggttcgggtttggtttggtatttttataatattttttgttaaaagttatatatagttaataagtatttttagtggggaaagttattaattagtagagttgttttaaatgtttagatattatagtattattttgatttttgtttattttttgtatttttttatttaaattaaattaagttttttttttttttttttttttttttttttttgtacgtaatgttaatatagaaatttttggtttggaataaaatgttttttttaggttaatgtagtttatttattttataggtggtataggtttgggtaattcgttttttatttttattttttttagcgtatagaaattttgtaaaagtttgaaaacgtaggttttaagaggttttcgtagttcgaggttagttcggtggttcggttttagttgtgttcggcgatagttaagatggttttgagcggggtttattgcggcggcggggtcgaggggcgtcggtcggggtcgttgttttcgtcgtttatttgagcggcgttagggattagggggtaggttcgacgtttttttcgtttcgtcgtagtttcgagtcggcgcgttttcggaaacgggggtcgggcgggcgttaggtaagcggcgggggcgatggggacggtcgcgggggcggtttcggattaggtgggttttgcgggtttgttgagagttcggtagggtttaggggttaagcgtaggtagaggtcgcggtcggggtttatgcgggtcggagttcggatttaagtcgggtcggaggcggtcgggagcggggcgggaagtcggggagggagagagggagaagtcggcggttgtcgtggtttttttagtcgggttcgggggcgttcgttggggtaggtcgcgacgacgcgggttgtcgcgttagggggttgggatttcggcgcggtcgcgttttttattttgtatgttgttgacggtcgggtggtttggcgtcggggattttacggggtcgggggtgtcgttgtcgttgtcgttttcggagtcgtcgtcgtcgttcgggttcggagtcgttattgttgggagtgaagagtcgagcggcgtcgcggcggttgtaatgtagtaagttcggtttttcgtacggtcgaggggcgaggtttattttcgttttggtttcgttttcgatacgtttcggatacgttttttgatacgttttcgttagagttcgacgcgtagttcgggttagatgttgagttgtagaatcgttcggttttgggtgcgcgatttgtgaagtagatagttgttttggattagggttgcgggttcgcggggtttaaagtggtttgtagaattaaaggtgggtttgtatttgtgcggaaagaaggtacgtagtttttattatttttatggaggtttgtgatttttaaaagtttattttgttggaattttagaattttaaattagaatagtaaagttgaaaaggattttagggattttttttttttttagtcgttaatatattatttttagaagggagttatttagagttatggttatagtttggaattttttttaagtttaatattttaattttttatatttttttgaggggaaaggggagttttaaggggaattaattaaagtgttgtttatggatttattttaaaattattgaattagaggttatattttaataatattattaggtaatttgtatgtttattaaatttgagaagtatatatttaagtattcgatattttttagttttttgaaatatgttatttatattattatttttttttaaatgtatattggatttttttttttaaattttttatattttgtataagacgagtcgtagttattattgtaagttatataaaatgataattttaaaaaataatatgaggttttttttattgttttgtatagagatttttattttaggaagatagtagttaaaagaagaaaaagttttttatgaggttacgatttgtaagttaattataatgtattcgaaatggtaagatatgggtttttggttaggtagttttgtttaaaatggaatagttagttattttattttttaaagaatttaagttatggagttggatatttttttttatttagaagtattgtgtgatttatagttagattttttttttaaaattttttttatttagatgttatttgatgttgagagttttttatagtatgttggaaatgtgttttgggttaaaatagttttgtttttttgttttaaatttaattttatttattattttgatggtttagattttaaaagtggttagtcgtaaatattaagtggagaggtattaaaggtaaattgaaggtgagagtaggtaggtgtattttagtggagagttcgttagaatttttttttatgggtttcgttggttgtttaatatttttaagtttaggttttataaatatggttagatttttatttggaaattagtagtttatttagtttttgttgtttttagggtattttaattatgagttattataattggtttttaataagaatttaatatatatttttttaatagaaattttagaagtagtattatagattaggtaattattagaaaattaatttaaatatatatatatatatatatatatatatatatatatatatatatttaatattataaataatatatattaaagaaggttggggatgttggtttatatttgtaattttagtattttgggaggttaaggcgggtggattacgtgaggttaggagttagtgattagtttggttaacgtggtgaaattttgtttttattaaaaatatagaaaaaaataaaaattagtcggtgtggtggtaggtatttataattttagttattagggaggttgaggtaggagaatcgtttgaatttgggaggtagaggttgtagtgagtcgagattgtgttattgtattttagtttgggtgatagagtaagattttatttattaaaaaaaatatgtatatatatagttatatttatatatatataggaaaatttttaatttagtaaatttattaagggaaattgggaaattgaattaaaagagaaatataataaaaatataattaattttatttttaagaatatttaattttgagtttgtgataaaattgatatatatttgtattgttgttggtattgtaaattagtaagagttaataattagatgtgtatatggtaaaaataagaaagtattttgatttgttttaattgaggaagttatgtatgagttttttaatttttttttatgtttatattttttttatatatttgtgttttatgattttttatggattaaattgtattttgtttttttattaaatttatatgttggagttttaatttttagtattttagaatgggattatatttggaaatagggtttttaaagtaaaatgaggttatacgagtgggttttaatttaataggattggtgtttttataaagagattaggatgtagatatatagagttaggagaagatgattatttataagttatagagtgtgtttttaaaagatattaattttgtttatattttggatttttagtttttataattgtgagaaaatatatttatgttgtttattggtttttttgttatgatattttttagtaaattaatatatagtttagaaaaatgaattgtttaaaaaaagttaatttttttagtaataatggtggtagttggtataattattggggagacgggaaggtaattaagtaatatatatgaataattagtaaatttatatttataagatatttttgaggaaatttttaaatgggtttgaaatttttggttttgttatgtagtgattttatttttttattagagtagatgaaaataataaattaagatgatttttaagaggaatgtatggtaatattaaagttttttattttgaaagaggttgtagagaaagagtaacgtttgtgtattttttgtttagagaatttttgttgagaaatttagtttgtttgttttttatgatatatatgttaatggttagattaaaaatatatttttttttttttttgagatggtgtttcgtttttgttgtttaggttggagtgtaatggcgcgatttcggtttattgtaattttcgttttttgggtataagtgatttttttgttttagtttttcgagtagttgggattataggtatgtgttattatatttggttaattttttatttttagtagagacggggttttattatattgtttaggttggtttcgaattttcgattttaggtgatttgtttgttttagttttttaaaatgttgggattataagggtgagttattgtatttagttttaagaatatattttttattttatattttaaataaagaaaaagtaatttataattggattttattttaggattttaattttagtttttgggaaagaaataaggttagatatttttatttggatggaatagttattagatattttatatagttttagtaattgtttttgagtaaaacgtttatttttaaattgttaagggtttaggattaggttatttagtgacggatgttgtttttttaggtagagagttgtaagttgtgtaggtttttggatgttattcgagtattgaatttaattggaaatatagggtttgtgagaaattttgattagtttatgttattaaagaattaaagttttatttggtttagataaaagaagatgttattaatttttttttttgagatagagttttgttttgttgtttaggttggagtatagtggtatgattttagtttattataatttttatttttaggtttacgttatttttatggtttagttttttaagtagatggtattataggcgtatattattatgtttagttaattttttgtaattttagtagagatggggttttattatgttgtttaggtttgttttgaatttttggtttttggtggtttattcgttttggttttttaaagtgttggaattatagacgtgagttatcgtatttggttaatattattattttgattattaataattatgtatatgtataaagatttataagaaaatgtttatgataatattatttataagagtaaaagaatggaaatattttattttaagttattataaaaggtgaatattatgttattatttatgttagtgaatattatggtttgattaaatataaatatattacggaagtataggattttattttgtaagaattatatttataatttgtttatatattttgtattttgttgttttaattttattggaataaaaaaaaaaaggattgggtatagtggtttatgtttgtaattttagtattttgggaggttaaggtgggtggattatttgaggttaggagtttaaaattaaggtgggtaatatcgcgaaattttatttttattaagaagataaaaattagtcgagtatggtggcgtatgtttgtaattttagcgatttaggaggttgaggtaggagaattatttgaatttaggaggcggaggttgtagtgagttaagatcgtgttattgttttttagtttgggagataaagggagattttattttaaaaaataaataaataatttgaaataataataataaaaagaaataaataagtaaaatatagggaaggaagtttgaagattaattgggaaggagaaaaaggaattttttggggtaacggttatattttatattttgataagagtttgggttatataagggtaagtatttgttaaaatgtagtaaatatatgttaaagatttgtgtattttattgtatgtaaattttatattaaaagaaaaatttgtaaataaatattaggttgagtgtggtggtttacgtttataattttagcgttttgggaggttaaggtagatagattatttgaggttaggtgtttgagattagtttggttaatatggcgaaattttgtttttattaaagatataaaaattagttgggtgtggtggcgtatgtttatagtttcggttatttagaaggttgagtattaagagaattgtttgaattcggga

SEQ ID NO: 2205 - DNA, 9021 bp, Artificial Sequence
  chemically treated genomic DNA (Homo sapiens)
tgtttagtttagggtttgtgaatgtacgaatcgatattttgtatttagttattttggtggggaggtggagaatttttgtgtttagtttagggattgtaaatatattaattagcgttttgttaaaatagattattcggttttattaattagtaggatgtgggtggggttagataaaagaataaaagtaggttgtttgagttagtagtggtaagttgtttgggtttttttttatattgtggaagttttgtttttttttgtaataaattttgttgttgtttattttttgggtttatattgtttttatgagttgtaatatttattacgaaggtttgtagttttattgttgaagttaatgagattacgaatttttcgggaggaatgaataatttgagacgcgttgttttaagagttgtaatatttatcgcgaaggtttgtagttttatttttgagttagcgagattataaatttattagaaggaagaaatttcgaatatatttgaatattagaaggaataaatttcggatacgttatttttaagaattgtaatatttatcgcgagggtttacggttttatttttgaagttagtgagattaagaatttattaatttcggatatattagttattagggaggttgaggtgaggggattatttgaatttaggaagtcgagggtgtagtgagtcgagattatgtcgttatattttagtttgagtgatagagtgagattttgtgttaaaaaaatagaataaaataaaataagaacgttgaataggttgtgtgttaattttgagatggagtttagatttaagaatgattttgaggtttagatttatatttaagaggatgattttagtttggtatttataggttttttaggtattttagatgtattttgttttgaattaagttttttgtttttgaatttgttttttttggtaaatagtattaagggggttagaaatttgggggttgtttttatttttttttttttattatgtatttttaatgggtggttggatttgtggttgtattttcgtgattttttagtttttttttagtgatggttttaggtgggtttttattttgttttttaaatggtttttttgttttgagttttattttatttgtttttagtttatttattgagttattttagagattattttgattttttgtggatatttttttggtggttttttttttttgttagttagaaattgtttttgattgtatgtaataaatgtggttacgttatttaattaaataaaggtttatttttttcgtgatgaaaagtatatagataagtagtttatttttatcgataattattgagggttttttatgatttttatagtaatgaaatgtgtatttatagtataaagatatataattttaaggttttaatataattgggtttaagtatagtattttttgttttagtttttaattgtttaggtgattttattgtgtagttagggttgataaatattgtatttaggtttagtgtttttgatttgtagttgaggtttagagagaattattgaaattgtagttttagttatttgggaggttgaggttggagaattgtttaagtttagcggggtgaggttgtagtgagttaagattgtattatcgtattttagttcgggcgatagagtaatattttatttaaaaaaaaaaaaatttttggtttatttttttgtttattttttaattatagaggtttttaaatatgaatttttatttttaggaaggttgaaatgatatattataagcggtttagttatttgtacgtgtcgttatttgatttaaggtatttatttttttttattatttttgataaagttgaattgtttatatgtgttatatttttttttttttttaattttttttttttttttttttttttttttttttttttttttttttttttttttttttttttttttttttttttttttttttttttttttttttttttttttttttattttttttttttttttttgatagggtttgtttgttttgtttttttaaattttggggtttaagtgtaaaggttttttttatttgatttttttattttattttatttaagttagatattttacgatgatgatgatgattattgttgagataggattttattttgttgtttaggttggagtgtaatggtgcgattataatttattgtagttttaattttttgggtttacgcgatttttttattttagttttttaagtagtttggattataggggtgtattattatgttcggttaattatatgtgttagatttaatttacgttttagggttttaaataattaaggttttattattttgttttaataaatatatttttataaagatttggaaggtaggttgaaatgtggaatttttggattttttttagttttacgtagaagggtagtagtggagagttggttgtttgttcgtttttggtttttttttttttttttatttttgttttttgtggtattgggtagggtttacgtttaaggttagtagtgtatttaataagggatagtttttgtgtggtttgtttaggattttatatataggtttagggttttttgggtaggaaattttaggattcgggtatttaagtggtgttttaaatagtggtttttggtcgggtgtggtggtttatatttgtaattttagtattttgggaggtcgaggttggtagattatttgaggttaggagttcgagattagtttggttaatatggtgaaattttatttttattaaaaatataaaaatttagttaggtatggtgtgtacgtttgtagttttagttattcgggaggttgaggtaggagaattatttgaatttagtaggcggaggttgtagtgagttgagattgtattattgtattttagtttggtgatagagtgagattttatattaaaataaatatataaataaataaaaatagtgatttttaattgggagtgatttggtaacgtttggaattatttttggttattttagtttggtagggagggatagggtattattggtatttagtgagtaggggttagggattttattgaatattttatagtgtataggatagtttttatagtaaagaattgtttggtttaaaatgtttatagtgtttatattcgatgttttgtattaggaagatataaatatttttaaatattatagagttaaattttttatttttgttttagtagagatgatatttttgcggggggagtatttttttggttttaatatatttttttttttatgggagatgatgttagaagagggatagaataggacgattattttacgaaggtattatttaggtattattagatcgttttaaaagaagagtaatttattgttttaaagtagttttttcgtgtttgtgggcggattttttggtaagtttataatgaattgaaatttgtcgaattttttggaatttaaagaaattttagttttgggtaaaggttttttggttagtatttgtattgtttatgtaatcgtttagaatatacgaattatttggagattattattaaatataataggtaaaattgtaaatatgtatattttttagaggatgataaaaaaatgtgaattgtatttttttgatagaggatgtattagagtttgagggtttaaatagcgtaaataataaataagtaaataaatcgatagtagtgtattttaaacgaggttggaatagtttttattgttgttttatattggattttaattaagttttagtattttgttatatttaatattaagtattaggttggacgtggtggtttatgtttgtaattttagtattttgggaggtcgaggtgggtagatggttggtttgagtttaggagtttgaaattagtttgggtaatatggtaaaattttatttgtatttaaaatataaaaattagttaggtgtggtggtatatgtttgtggttttaggtatttgggaggttgaggtaggaggatggtttgaatttaggaggtggaggttgtagtgagttatgatggcgttattgtattttagtttgggtgatagagcgagattttgttttaaaaattaaataaataattttttcgtttcggataaaagtagtttgtattatttttttattttataatatgtttttgaaatattttttttgaaaggtaagttatatttattatttttgttgtatggaggtattataaattattttattattttattttttttgagtgttgtggtttttaggttagataaaaacgtaggtgatgtttagaagttaattagttgtcgtttggttatttgtagggttgtggttttgttaaataggaaaaatataaaaagaatatcgaattttgttaattaaataagaaattttatattaaggattaagaaaattgtaggggaagaaaaggtaagtttcgggattgaggtgtagcgattttttatatttttagaaaattaaaaaataagataaaaaaatgaaaattataaaagtatttattttggggcgttttaattgttgagtaataaatgagacgttgtggttaaatttagttataattaatgatatttttagataaagtgattttagatttttaaagcgtattttgtttatattattttgttaatttcgcgtattgtaatcggcgggttacgttttcgtgaaaagaaggttgttttttttatatttcggggttttggacgtttttcggttgcggggcggggggagttttcggcgtacgcggttttttggtttcgtttttagttattttcggttattcgcgattcgaggttgtcgtagggggcgggttgagcgcgtgcgaggcgattggtttggggttagagtgggcgaggcgcggaggtttggtttataaagtagtcgcggagacggggtgttggtttgcgtcgtagttttttgtagcgtttggggttttcgttgtagttttcggaattaggatttcggcgtggtttagcgagttatggcgacgaaggtcgtgtgcgtgttgaagggcgacggtttagtgtagggtattattaatttcgagtagaaggtaagggttgggacggaggtttgtttgcgaggtcgtttttattcgttcgttttttcgcgtatttttgttaggagcgggtcgttcgttaggtttcggggtcgttttggtttagcgttcggtttcggttcgtgtcgttcggtcggtgttttcgtttttagcggtgcggtgtttaagtgttgagttatcgggcgggttcgggcgcggggcgtgggatcgaggtcgtcgcggggttgggtttgcgcgtggcgggagcgcggggagggattgtcgcgggtcggggaggggcgggggcgggcgtgttgttttttgtggtttttgggtcgtcgtcgcgggtttgtcgtggtgtttggagcggttgtgttcgttttttgtttggtcgtgttttcgtttttgagggtttcgcggatatcgagtggcgtagtgttaggtttagttcggggatggcgattgcgtttgggttcgtttggtgttttcgtattttttttcgtttttcggttttagcgttttaggttagggagttttcgtttttgtatagttttaaggttaggaatggtttttatatttttaaaaggttttggaaaataaaaatacgtaatagagatcgtttgtgtgatattttgtagggaagtttgttggtttttgttttaggttatgattgggttgtaagggtagagaaggtagttttgaatagaggttttttttttttttttaagtttcgggagttagaggtttaattgatttttttggggatttttgagggtagtgattttaattttgggtgtatagttagtttatttgaagattttattaaaaatatattagagtttaattttcgattaattatattaaaatttgttttagtgtagggtgagtattgttgttttttgaaagtttttaaaagtgattttgatgtgtatttacgattgagaattgtcgtttgaggatagtgggtggagtttcgtatttggaaattagaagatttggagtttttattatatcgaattggtatttaataattgttgtcggagtattttttaagttatattttcgtaaagtggttttaaaattgttttgttagtaggtaggttgttaagatggttagagataaatttttgaacgatttttgtaaaatatatagaaatatttttagaatttttattagtaaaattataaaacgtgttgtaaggaaggtgtttgtgataatattgtttttagaattttagtgaagttattaattggtggaaaatttttttttgtattcggtttaaaaattatgagggaatatttattatacgaatgagatttagtttttaaaggggtttatagaaacgtgagaggataggaatagttagtttgtgtaaatgtttgaaatatatgtgagggagataatgagtttagtttttttttttaataggtttttagattttttggaaaaggttttttggtatttgattttattttgttgttttatttgttagatttttttttgtttttttttatttttttttatataatttattagtattagtgttttgttttttagattaagtttcgttttgtcgtttaggttggagtgtagtggcgcgattttagtttattgtaattttcgttttttaggtttaagtaatttttttgttttagtttttcgggtagttgggattataggcgcgcgtcgttacgtttggttaattttttatattttagtagagacggcgttttattatgttggttaggatggtttcgatttgttgacgtcgtgatttattcgtttcggttttttaaagtgttgggattataggcgtgagttatttcgttcggttattagtgttatttttaagacgtttttgaggaattttttttttttggttattgagaatttatgtatgaatttaggttttttattttttttgagtagtttgtatagtttttttttttaagcgtttgatttcgttttgtttggtgttcgttgtatttgagaatgagttttggatagtggagtattttagttttttagatatgtagagataatatattggttattagttatttggtttggtttatttcgtgtttaaaattttggattttttgttagtttttatagattagaattttttacgtattaatttagtttttttagttttttttgaagaatttttggagatttttttatattgagtttttattagtttaggatagtattgttgtagtagtttatatattttttcgttttttaggtttgtgttatttatttaagtttatagtttggtttttgtagggttgtattcgagtatagttatttagatgttttgaatgtattatcggttaaatggaggttttaaagaatttgttgtttttggttttgtgtttttgataatagagtgtttgagggataatttttatatttgagtttttttaaaattaaaggttgtagaagagttatagtatttattgttaaaaagaaaagaatttaaaaaggtagtaattgttaggatattttatttgagtaatgatattttttagtggaaagttatattttaagggttaatgttttttaattgttggtcgtatttgaaaataaattaagttaaaaataagagatattgatatgttgtatgacggtgtggtgtggatgttgtgtttattttagttttgagatttagttgtaatttttttgatttttgtatgtagttacggagtattattatttgttattattatttgaatggttatattgtttgtttttattttggtagagtggaaaggttatttaggttttagtgtttgaaaagattttagaaagtagtagtacgtttggttagattagaattagtttttttttgggggtagtggaatataatattttttgattgttaattaaaaatatttgtgatagtcgggcgtggtggtttacgtttgtaattttagtattttgggaggtcgagacgggtggattacgaggttagtagatggagattattttggttaatacggtgaaatttcgtttttattaaaaatgtaaaaaaattagtcgggtgtggtggtgggcgtttgtagttttagttatttaggaggttgaggtaggagaatggtatgaatttgggaggcggagtttgtagtgagtcgagattatgttattgtattttagtttgggcgatagagcgagattcgttttaaaaaaaaaaagaaaaaaatttatgatggatatttaaaaatatttattgagtggggagtggagagtaggggttttagggtagtttgttggatatttttagggcgattttttttttttttttttttaaagttaagtgagtatgttatatggaaaagggtgtgcgtggagaaaaagtaaggggttttagagtgtaggatgagatatatattttttgggttaaaaaggttgaggtaggagaatggcgtgaattcgggaggcggagtttgtagtgagttgagattatgttattgtattttagtttgggcgatagagcgagatttttgttttaaaataaaaaacgtttatatgtatatgtatatttaatatgtataaatataatttatttaaaagtatttattatataaataggtatttatattatttatttattgtaatagttaaagtttatgaagtatttaatattgatgtgtaggtatttattttgtttgttattttattaggtgttttttatgttatttaattatgaagtttggttatagggtgtttgtgtattgagtgtgggaataagattattattttttttttgaggatataggtttagagtagttaagtagtttgttggaggtttattggttagaaagtggttagtttgggatttggatatagatttttttatttttaagtttggttgttttttattttattgtgaggggtaaaggtaaattagttgttttttttgtttagaaattttttttaattttgtattttttttaaagg

SEQ ID NO: 2206 - DNA, 9021 bp, Artificial Sequence
  chemically treated genomic DNA (Homo sapiens)
tttttaagaaaagtgtaaagttggagagagtttttgaataaagaaaatagttgatttatttttattttttatagtgaagtaaaaagtagttagatttgggagtggaaaaatttgtgtttaaattttaggttgattattttttagttagtgaatttttagtaagttgtttaattgttttaggtttgtgtttttaaaagggagatggtaattttgtttttatatttaatgtataagtattttgtggttaggttttatgattaaataatataaaaagtatttaatagagtggtaagtaaagtgagtatttatatattagtgttagatattttataggttttgattattatagtaaataggtaatgtaagtatttatttatgtagtaaatatttttgaataggttatatttgtatatgttgaatatatatgtatatgtaaacgttttttattttgagataagagtttcgttttgtcgtttaggttggagtgtagtggtatgattttagtttattgtaagtttcgtttttcgggtttacgttatttttttgttttagtttttttaatttaaaaggtgtatgttttattttatattttggagttttttgttttttttttacgtatatttttttttatatggtatatttatttgattttaaaaaaaaaaaaagaaaaagtcgttttggaaatgtttaataggttattttgggatttttgttttttattttttatttagtgagtgtttttaagtgtttattataagtttttttttttttttttttgagacgagtttcgttttgtcgtttaggttggagtgtagtgatatgatttcggtttattgtaagtttcgttttttaggtttatgttatttttttgttttagttttttgagtagttgggattataggcgtttattattatattcggttaatttttttgtatttttagtagagacggggttttatcgtgttagttaggatggtttttatttgttgatttcgtgatttattcgtttcggttttttaaagtgttgggattataggcgtaagttattacgttcggttattataggtatttttaattagtagttagaaaatattatattttattgtttttaggagaggattgattttagtttaattagacgtattattgttttttgaaatttttttaagtattgaaatttaggtaatttttttattttattaaaatgaaagtaagtagtatagttatttaggtaatggtgataggtaatggtgtttcgtggttatatatagaaattaaggaagttataattagattttaggattaaaataaatataatatttatattatatcgttatataatatgttagtgttttttgtttttagtttggtttgtttttaaatacggttaatagttaaggggtattaatttttaagatgtgattttttattggaaaatattattgtttaaatgaagtattttggtaattgttgtttttttaaatttttttttttttgataatagatattgtgatttttttataatttttaattttggaaaaatttaaatgtgaaagttgttttttaaatattttgttattaagagtatagggttaaaaatagtaggttttttgaaatttttatttaatcggtaatatatttaggatatttaagtagttgtgttcgggtataattttgtagggattaggttatgaatttaagtgaataatataggtttgggaagcgaaaaaatatatgaattgttatagtagtattgttttgggttaatgaaggtttagtatgaagagatttttaaaaattttttaagagaagttaggaaaattggattaatacgtgaaaaattttgatttgtaaaaattagtaaagagtttaagattttaaatacggaataggttaagttaagtagttgatagttaatgtattatttttgtatatttggaaagttggaatgttttattatttaaggtttatttttaggtataacgggtattaaataaaacgaagttaggcgtttaaaagaaggaattatgtaagttgtttagggaaggtggaaaatttgggtttatgtatggatttttaatggttagggagaagggattttttagaggcgttttaagaatagtattggtggtcgggcggggtggtttacgtttgtaattttagtattttgggaggtcgaggcgggtggattacgacgttaatagatcgagattattttggttaatatggtgaaacgtcgtttttattaaaatataaaaaattagttaggcgtggcggcgcgcgtttgtagttttagttattcgggaggttgaggtaggagaattgtttgaatttgggaggcggaggttgtagtgagttgagatcgcgttattgtattttagtttgggcgatagagcgagatttggtttgaaaaataaaatattagtattggtgaattatgtggggagaagtaaagagggataaaaagaagtttgataaatgaaatagtaaaatggagttaaatgttaaagaattttttttagaaaatttggagatttattaaagaaaaaggttaaatttattattttttttatatatattttagatatttatatagattaattgtttttgtttttttacgtttttgtaaatttttttaaagattgaattttattcgtatagtaaatatttttttatgatttttaagtcgagtgtaagagaaaattttttattagttggtaattttattaaggttttggggatagtgttattataagtattttttttgtaatacgttttgtaattttattgataaaagttttgaaaatatttttgtatattttataagagtcgtttagaagtttgtttttgattattttagtaatttgtttattggtagagtaattttaaagttattttacgaaaatgtggtttaagaaatgtttcgataatagttattaagtgttaattcggtgtaatggaaattttaggttttttaatttttaaatacgaaattttatttattgtttttaaacgatagtttttaatcgtaggtgtatattaaaattatttttggaaatttttaaaaaatagtaatatttattttgtattaggataggttttgatgtaattggtcggaggttgggttttggtgtatttttagtaagatttttaaataagttaattgtgtatttaaagttaagattattgtttttaaaaatttttaaaagggttagttaaatttttggttttcggagtttaggaggaggaaaaggatttttgtttaaggttattttttttgtttttgtagtttaattatgatttagaatagaggttagtaaatttttttgtaaagtgttatataaacggtttttgttgcgtatttttgttttttaaagttttttaaaaatataaaaattatttttagttttagagttgtataaaagcgaagattttttgatttagagcgttgaagtcggaaagcggagagggatgcgaagatattaggcgggtttaggcgtagtcgttattttcgggttgggtttggtattgcgttattcggtgttcgcgggatttttaggaacgagaatacggttaagtaagggacgagtatagtcgttttaggtattacgatagattcgcggcggcggtttaaggattatagagggtagtacgttcgttttcgttttttttcggttcgcggtaattttttttcgcgttttcgttacgcgtaggtttagtttcgcggcggtttcggttttacgtttcgcgttcgggttcgttcggtgatttagtatttgggtatcgtatcgttgggggcgaaggtatcgatcgggcggtacgggtcgggatcgggcgttggattagggcggtttcgaggtttggcgggcgattcgtttttagtaaaggtgcgcggggggacgagcgggtgggagcggtttcgtaaataagttttcgttttagtttttgttttttgttcgaaattgatgatgttttgtattgggtcgtcgttttttagtacgtatacggttttcgtcgttataattcgttaggttacgtcgaggttttggtttcgaggattgtaacggaaattttagacgttgtaggagattacgacgtaaattagtatttcgttttcgcgattattttataggttagattttcgcgtttcgtttattttggttttaaattaatcgtttcgtacgcgtttagttcgttttttgcggtagtttcgggtcgcgagtggtcgggaatgattgggggcggggttaaggggtcgcgtgcgtcggagatttttttcgtttcgtagtcgggaaacgtttagaatttcgaaatgtggagaaaataattttttttttacgggggcgtggttcgtcggttgtagtacgcgaaattggtaaaatgatgtaaatagggtacgttttgaaaatttgaagttattttgtttagaaatgttattagttatgattgagtttggttatagcgttttatttgttatttagtaattgggacgttttaagatggatgtttttgtagtttttatttttttgttttgttttttagttttttgagggtatagaaagtcgttatattttaatttcgggatttattttttttttttttgtaatttttttagtttttagtatagagttttttatttggttggtagaattcggtattttttttatattttttttgtttggtaaggttataattttatagataattaaacggtaattagttggtttttaggtattatttgcgtttttgtttggtttaaaggttataatatttaaggagggtagaatggtgaaataatttatgatgtttttatataataggaatgataaatatgatttattttttaagggaaatattttaaaaatatattgtgaaatgagaaaatagtgtaaattatttttgttcggggcgagggggttgtttgtttgatttttgagatagggtttcgttttgttatttaggttggagtgtagtggcgttattatagtttattgtagtttttattttttgggtttaagttatttttttgttttagttttttaagtatttgggattataggtatgtgttattatatttggttgatttttgtattttgggtatagatggggttttattatgttgtttaggttggttttaaatttttgagtttaagttagttatttatttatttcggttttttaaagtgttgggattatagatatgagttattacgtttagtttagtatttaatattgagtatggtaaaatattgagatttaattgaagtttagtgtgaaataataatagaagttattttagtttcgtttggagtatattattatcgatttatttatttatttattatttacgttatttagatttttagattttaatgtattttttattagagaaatataatttatatttttttattattttttaggaagtatatatatttgtagttttgtttgttgtatttggtagtagtttttagataattcgtatattttaaacggttgtataaatagtgtaaatgttggttaaagggtttttgtttaaggttaaagtttttttgggttttaggaagttcggtagattttagtttattgtaaatttgttaagggattcgtttatagatacgagagagttgttttgggatagtgaattattttttttttgagacggtttaatgatgtttgggtggtgttttcgtaggatggtcgttttgttttgttttttttttggtattattttttatggagaaaagaatgtgttgaagttaagaagatgtttttttcgtaagaatattatttttgttagaataggggtaaggaatttaattttgtgatatttaagagtatttatatttttttaatgtagggtatcgaatgtgggtattatggatattttgggttagatagttttttgttgtggaggttgttttgtatattgtaggatgtttagtagaatttttagtttttatttattagatgttagtaatattttgtttttttttgttaggttgggataattaaaaataattttagacgttgttaaattatttttagttaagaattattgtttttatttatttatgtatttattttgatatggagttttattttgttattaggttggagtgtagtggtgtaattttagtttattgtaattttcgtttgttgggtttaagtgatttttttgttttagtttttcgagtagttgggattataggcgtgtatattatgtttggttaagtttttgtatttttagtagagatggggttttattatgttggttaggttggtttcgaatttttgattttaagtgatttgttagtttcggttttttaaagtgttgggattataggtgtgagttattatattcggttaagaattattgtttagaatattatttgagtattcggattttggaattttttgtttaaagagttttgagtttgtgtataggattttgaataggttatatagggattgttttttgttgagtatattgttagttttgaacgtaggttttgtttagtgttataaggagtaggggtggggaaaggaggaaaggttaggggcgggtaggtagttagttttttattgttatttttttacgtagaattgaaagaagtttaagaattttatattttaatttgttttttaggtttttatgaaggtatatttgttaagataggatgatagagttttggttgtttggaattttggaacgtgggttgaatttggtatatgtaattagtcgggtatggtggtatatttttgtagtttaagttatttgggaggttgaggtaggaggatcgcgtgggtttaggaggttgaggttgtagtgagttgtgatcgtattattgtattttagtttgggtaatagaatgaaattttgttttaataataattattattattatcgtggagtatttaatttaaataaaataaaatagggaaattagatgagagggatttttgtatttgaattttagggtttaaagaagtagaataggtaaattttgttagaaagaagaaaagagagtgagagagaaagagaaagaaagagaaagagagaaagaaaaagaaagagaaagaagaaggaaggagggagggagggaagaaagggaggagggaaggagggaaggaattagagaaagaggagaatgtggtatatgtagatagtttaattttgttaggaatggtgaggaggaatagatgttttaaattagatggcggtacgtgtagatgattaaatcgtttgtaatgtgttattttagtttttttgagagtgaaaatttatgtttggggatttttgtggttaaaaggtgggtaaaaaggtagattagaaatttttttttttttagatggagtgttgttttgtcgttcgggttggagtgcggtggtgtagttttgatttattatagttttatttcgttgggtttaggtaattttttaattttagttttttaagtagttgggattgtagttttaataattttttttagattttagttgtaaattaaaggtattgggtttagatgtagtgtttattaattttggttgtataatagaattatttgggtagttgaaaattaaaataaaaaatattgtgtttaggtttaattatattaaaattttaaaattgtatatttttatattgtaaatatatattttattgttgtaagagttataagaaatttttaatggttatcgatggaagtaggttgtttatttgtgtattttttattacgagaaaaataaatttttatttggttaaatagcgtaattatatttgttatatgtagttaaaagtaatttttaattgatagagaggagaagttattagaggggtgtttatagggagttagaatggtttttggaatagtttagtgggtggattgagagtagatggggtgagatttaaggtagagaggttatttgggagataggataagagtttatttaaggttattattggaagaaagttgggagattacggaaatgtaattataagtttagttatttattagaggtgtatggtgagagagggaaggtaagggtagtttttaggtttttagtttttttggtgttgtttattaaggaaagtaggtttaaggataaagggtttaatttaggatagggtgtatttgaagtgtttgaagaatttataagtgttaggttggaattatttttttggatatgggtttaagttttaggattatttttaagtttggattttattttagaattaatatatagtttatttaacgtttttgttttattttgttttgtttttttgatataagattttattttgttatttaggttggagtgtaacggtatgatttcggtttattgtattttcgattttttggatttaggtgatttttttattttagtttttttagtagttggtgtgttcggaattggtgggtttttggttttattgattttaagaatgaagtcgtggattttcgcggtgagtgttatagtttttaaaggtggcgtgttcggagtttgttttttttgatgtttagatgtgttcggagttttttttttttggtgggtttgtggtttcgttggtttaggagtgaagttgtagattttcgcggtgagtgttatagtttttaaggtagcgcgttttaagttgtttatttttttcggggggttcgtggttttattggttttagtagtgaagttgtagattttcgtggtgagtgttatagtttataaaggtagtgtggatttaaagagtgagtagtagtaagatttattgtaaagaaagataaagtttttatagtatggaaggggatttaagtagtttgttattgttggtttaggtagtttgtttttatttttttatttggttttatttatattttgttgattggtagagtcgagtggtttgttttgatagggcgttgattggtgtgtttataatttttgagttagatataaaggttttttatttttttattagagtagttagatatagagtgtcgattcgtgtatttataaattttgagttagata

SEQ ID NO: 2207 - DNA, 6917 bp, Artificial Sequence
  chemically treated genomic DNA (Homo sapiens)
aagtggtttaatgtaattaagtttaaaatatgtagtttgtaagtttttttgaggaataatgttatattggaattttagttttggtattcgttgaagttgtagttaaattgattttggtgtatggaggtttatgattttgagtttatttataagttttattttggttggtatgattattttttttatgaatatattaaataaagataagagtgtttgggaaagaggttgtttgaaatttatagaatgtattattttatttttttgattattaaatttttttgttgaggttgttttttggtgagtatttatatgaaatttgaatatttttatattatatgtttatttgtagagatagttatatatattttttttttatatttgtttattatttattttataattatgttttttttaaaggatttttagttaaattattaattattgtttatgaagtgggataaatttatatttttgtttttatgtttttttttatataaaatgagtaagtttttttggtatttttttttattttgggtaaatgtatattttttaataagtgttttttattttaaggttagtaatagtagttattgttatttagatttaagtattataattaatatagatattgataatagaaattaggttttatgtaataaaatttaaggaaattggggaattttgaagttgattttttgttttattagggttaaaggtagttgaaaattttatttgtgttttataaggggaatatggtagtttatgaaatgaaagagtatattatttaattaagtggttttttaaaatgtaaagtttttggaaggtttggttttagaagattttattgttgttatagagaagtttgaaaaatgtaagtagttaatagattgtgaggtgaagtggatgtttatgatggtattagaaagttttaaaaaagaagtttaaatttttgtttagaagtttaattttttggtttaagtgttttaggaatatatggaagatagggaatatgtaaatataatttttggagagttaagttagttaaattttatgtttgttatttgattttgtgtattattaaattatagaatttgttgattttttaatattgatgtcggttttgtcgaaattagttattgaaatgtaaagagtaaaaatttaagaataggatagttgagagagttaaaagaattttaattttaaatttttattgagttttttttgttagtaaaagtagtttttttttttgtttaatgtagttgttttttttttgtttatatattcggtaatttttttgttcgtgagatttaaattgtaaaaagaagttaatttttttaatgttattattttataattattgttgtttttagatttgtaagtagagtaagattttattatttttttttagattagggtggaggattaaatattaaaataatgagaaaagtgtttataaattgaaagaattgtggaacgttgaatatttttaaaataaaatttgtgtgggaataattatgagggtgtttatttaaaaaaggagatatataattttagatttgattgaatttattgatatggtaaaattttttagagagtttttatttaatgtgttattttagtagttttatataagattgaaattattgtgataaatataagtttgtaagattttatatttttttaattaattgtatttgaaggagaatgtattagtagaaagtagaaatgaatagtagtagggggtagagataaagtttagggaatatggagatttgaggtgagggaatatatgataatagaagaaagggaagagaattatttgtttttggatttttattttgtacggggtattattataggagtttttggatattatttttaaattttattttatatttttaataattatatgatatgggaattattattatttttattttagaggtgagaaaattgaggtttaaggatattaggtaatttgttttaaattatatagttataatatagagatatggtaggggtataggtttaatgtttgtgatgttagagtatagggtaagggagtttgtagagggaagggtattttttttttatgtcggagataagttttgttagtaaagtttagttgaattagaagtagtagaaaataatttgtgttattgtttgattatgttattagagggtataggtttggaagttttttttttatatagttttttgttgttttttttgtagggatttgttgtagttgagagagtaatgtgttatattatatggattaatttcgtagtttagagatttgagtttgttattttttttttttaggatatatgtattagtgattattatatttgtgaggtgtgttttttttaatatgggtagcgggtgttaggtagttagaaagattttttgggtttaggattgatatttattaattagttttgaaattttagtgttgattgtggttttttttatatagtgggagtttagtttatgttttgttaagaagaaataatggtatatagagttattttttgtttattttttagtggttttttagtgtttttaaggtaaagttagtattatttgttttggattataagttttattatagattgtatttaggtttagttcgaattagttttttattttttgtttttttttttattataaattaatatatagatttttaatgtagtattgaagttggtagggtttggaatttgatgttttataaaatgtttgtagtaaaatgttttatatgtttgtagtaaatatttagaagtaggagttgttgttgttgttattgttattgttattattgttattattattattattagagttggaaatttttagaagtaggttgaatttaagttttttgattgagtttagttttttttgtttttattgtttttttgtatataattagtatataattaatattggatagtggaatttttaattttagtttttttgattttttttgtatttttttttggagttttgtggttaggggacggtatagggaattttaatgacgagaagatagggttggttttttttttagtagatatatatgtttgtagtattagaagtttagggttggaagttatttttgatattattttttttgcgaatgtatgtataatttttatagaatttattagaaaggattatttagtttttgtttttgtataatttttttttaaaaaattgttaattttattgttgtttggtttaatagtgagaatttttttttgttgttttttggtgtttttgtttatggtttttattttgtttgttgaagatatttttgttagtatggatttaaatttttttagttttgataatttttttttttttttgttttatatgaagggtttggtagttaaagtaattatttaaagtttaaattttattattttttgttttgttttttttggttttggttttgtatattagttttgaaaatattattttagggttaatgttggggttaatttataattaagagtgttttagttttgtaatataggatatgttataaaaatggaaagatgttgttttttgagagatgtaggtggatttttgggtatttgttgtaagtattttttttttttttggaaattttgaatatttttattagtaagttagagttttaaataattaagttggtaagttagagttttaaattaaatttttggttttaggggtgaaggtttaagtgtggttatttaataattgattttttattagttttagtgatttttaaagaaagaggattttgatgatgatatggagattggatagagtggtgaataaagggggttggtatggaggatataggagatggtgtgatttgttaggagttgatatagtagtttaggttatgaattgagaggtagaggtagtaggaatgaagagaagggagaagttttgagagttatttaagagttagtatttataagatattatgttttattagatatggggaatgagaataaaaggaggttatgattatttttaggtatttggtttaggtgtttttatagatagtgatgtgataaattgagatgtggaatgaagatgagggagtaagtttaaggtgtagggagatgatatgtttatatttggtaattttgagatttttttattgagattgaggtttgtgtggattattttggtggttatatttaaaagaaagttggataaatggttaggagtttaggagagtaatttgagagagatatagtttttagtaattgagtgcggagggtaagattatttaggaagaagatggagggtggaggaaggattttttttttgagtttatagattttttttttttaagtatatatgtttatttttattggatttttatatttgatttttttattttatttttttgtatttttttaggattagagaattttatattttatttttttggttttttttataataattaaaagtaatatgtataggtgtaagaataatagtgttaagatgttttataatttagaaatgattgtttagatgttattaagattaatggtgaaagaaatgtaaaatttagaaaattatttttttattttttggttgttcgaaaatatttttatggtttttatgtattgtaaaatgtatgaattttagtttatgattttgtacgtggttttataaattattatttatttattttaattaattatatattgtataaattatttttattttgttttttagttaaataagatgcgagtgtttttttattttatagattttattttaagaaaatgttagatgaaaaaaaaaatttaaaattttaatttataatgaataatgtatatagagggagtattagtttaatttaagaatattttttttttttaaaaggttgtttttagtttagaaaaaaagtgatttaatttttataaatttaatttatttatagcgtttttataatgttgttataatatttgaatgatagtttatggtattattttcgtggttgtagtaagttattttttttattttttgtttatattagatgtattttttgttttttaagggagagaaatttttgtttagtttttgatgagtatattattaaatatttattattgttttattaattaatgtgggtggttattatgtgtttttggtttagggagtgttttatttaattaagtttttttagtggttgttttattttattttttatagattaatttttttttaaaatgttattatttttgtatttggtttttttggtatttgggttttatgttataatttattgtgtattatttgaaggtaaagtaatagtttgttatttattttaattaaatgttattttttataagatgttatttattaatgttgattttgtatttaatttgtatcggaggtttattgtggagattttagataagaatattttttttttttttgtgagtatttttgtagttttggttatgtttttttttggggtttgttgtagtatttaaattgagattgtggagattttggggtttaattttatagatattttaatggtagagatttagtatggtttttagtatttgatttgtttattgaattttttaaagaaggaattggaattgtagataggaaatgttttttttattggtaagtatttgaaattattggtaaagtttttgaatgatgttaagattttttatgagattgaagttttttttatcgatttttttaatatttttgtagttaagtaggagattaatagttatgtggagatgtaaattaaagggaaagttgtgggtttaatttaagattttaagttaaatattattatggttttagtgaattatatttattttaaaggtaagatttttagatgttaatttttagtttagggtttagatatttgggtggagtgttgaggggagtttatggttttttattattggtattagtaggtgttttttatattatagtgatttgttttattggatatagttgtgaatagtattggattttttaagatggatatatagttttgtgaatgagtttaggaaatttttagggagagcgtttttttagagaggtgggtgataatggtatgaatattttgtttataattggttaaagatttatggtttttaaaagatttggtgaggtgggataagtttgtatttgttaagtagatatatttgtatgtaaagtttattgtgatttttatttgttgtatatatttaggtatgttatatatataattttattatgtattatgtatttattgtgtattaaatattatttgatatgtgtggtatatatatattgttttaattaatatttataagtgtttaagtttatatagttaataagttttagaattgatattattaataaggtttgtgtgagtttaaagttggtgtttgtagaaataagaattatgtgattattttttaaaggtattgtgtttaaatgattttttttggttttatagtatatgttagttatattttttggaggagtaattaattgtcggttataaattatatatagatagattggttaaaattgtagaatagatttgtttttttatttttttttagtgtgttggatgtcgttatatttttttatggaagaggaaattatggttttgatgggtttagtgtggtatagtagttttgaatatagattgtggagtttaatagttttgggtatgatttttggttttgttatttgttaattgggagattatgataaatgattttttttgtttgatttttagttatttgtaaaattggttgattgtaggtatttaattttgtggtgattttaatttttaaatgaaattattaatggaaaaggttttgttggtattgatatcggtttaaaataaatattttttttttttttgtattttaagt

SEQ ID NO: 2208 - DNA, 6917 bp, Artificial Sequence
  chemically treated genomic DNA (Homo sapiens)
gtttaaaatataaagaaaagagaggtgtttattttaaatcggtattagtattaataagattttttttattagtgattttatttagaaattaagattattatagagttaggtatttatagttaattagttttataagtgattgaggattaggtagagaaagttatttgttatggttttttagttaataggtggtagagttaggaattatatttagggttgttgggttttatagtttgtatttaaaattattatattatattaagtttattagagttatagtttttttttttataaaaaggtataacgatatttaatatattagggagaagtgagaaaatagatttgttttgtaattttagttaatttatttatgtgtggtttgtggtcgataattgattatttttttaagaaatgtggttgatatatattatagaattaggagaaattatttgagtatagtatttttaggaaatagttatatgatttttgtttttataagtattagttttagatttatatagattttgttggtaatattagttttaaaatttattaattgtgtaaatttggatatttatgagtattgattgagatagtgtgtgtatattatatatgttagatggtgtttagtatatagtgagtgtataatatatggtaaaattatgtatgtaatatgtttaagtatgtatagtaagtgagaattatagtaggttttatatataaatatgtttatttgataagtgtaagtttgttttattttattaaattttttggaaattatgaatttttagttaattatgagtaagatgtttatattattgttatttatttttttgaaagggcgttttttttagaaattttttggatttatttatagagttgtgtgtttattttggaagatttaatattatttatagttatgtttagtggagtagattattgtggtatgagggatatttattgatgttagtaataagagattatgagttttttttagtattttatttaagtatttgagttttagattgaaaattgatatttgaaagttttatttttaaagtgaatatagtttattaagattatgatggtgtttggtttgaggttttgaattagatttataattttttttttggtttgtatttttatatgattgttaattttttgtttggttgtagaaatgttggagaagtcggtagaaaagattttagttttatagagggttttgatattatttaagaattttgttagtggttttagatgtttgttaatgaagagggtattttttatttgtaattttagttttttttttggaaaatttagtgaatagattagatgttggaagttatgttggatttttattattggagtgtttgtgaggttgaattttaaggtttttataattttagtttgggtgttgtagtaggttttaaaggaaagtataattaaagttgtagaaatgtttataggggaaaagaagatgtttttatttggggtttttatagtgaattttcggtatagattgaatgtaaagttagtattaatggatgatattttgtagagagtggtatttggttgggatgaatggtaggttgttattttgtttttaggtgatgtatagtggattgtagtatgaagtttaagtattaagagaattagatataggaatggtgatattttggaaggaagttaatttataagagatgaagtgagataattattgagggagtttagttggatgaaatattttttgagttagagatatataataattatttatattgattaataaaataatagtaaatatttgatgatgtgtttattaggggttgagtaggggttttttttttttgaaaaataggagatgtatttaatatggatagggagtaggagaagtggtttgttgtaattacggaaataatgttatggattgttatttagatgttatagtaatattatgaaaacgttgtgagtaaattaaatttatggaaattgaattattttttttttgaattagaggtagttttttggagagaggggatatttttaggttaaattagtattttttttgtatatattatttattgtagattagaattttagatttttttttttatttggtatttttttaagataaaatttatgagatgagagaatattcgtattttatttggttaaaagataaaatgaaagtaatttgtataatatatgattagttggaatggatgggtggtggtttatggagttacgtataaggttatgagttgaaatttatgtattttgtaatgtatggaagttatagaggtattttcgaataattagaaaatgaaagaataattttttaaattttatattttttttattattaattttagtaatatttaaatagttatttttaagttgtaagatattttaatattattatttttatatttatgtatgttatttttaattattataaagaaagttagaaagataaggtgtaaggttttttgattttgaaagagtgtaaagaaatggagtaaagaagttaggtgtggaaatttaatgaaagtggatatgtgtgtttagaaggaagaggtttatgaatttagaaaaaggattttttttttattttttattttttttttgagtgattttatttttcgtatttaattgttagaaattgtattttttttagattgtttttttgagtttttagttatttatttagtttttttttggatataattattaggatggtttatatagattttagttttaataagaaaattttaaagttgttagatgtaaatatattatttttttatattttaagtttgtttttttatttttattttatattttagtttattatattattgtttatagagatatttaagttagatatttgggaataattatagtttttttttatttttattttttatatttaatgaagtatgatgttttatgaatattaatttttaaataatttttaaaattttttttttttttttatttttgttgtttttgttttttagtttatggtttgagttattatattagtttttaatagattatattattttttatattttttatattaattttttttgtttattattttatttaatttttatattattattagagttttttttttttaaaagttattgaggttggtagaaagttaattattagatgattatatttagatttttatttttagagttaggaatttggtttgggattttgatttgttaatttggttatttgggattttgatttgttgatagagatgtttaaagtttttaaagagaaaaaaagtatttatagtaaatgtttaagaatttatttgtattttttagaaagtaatatttttttatttttatagtatgttttgtattgtaaaattagagtatttttagttataaattaattttagtattaattttgggatggtatttttaaagttgatgtataaaattaaggttaagaggaataaagtaaaaaatgataaggtttgaattttgagtgattgttttggttgttagattttttatgtaaaataaaagagaaagaggattgttagagttggaggggtttaagtttatgttggtaagagtgtttttagtaggtagaataggggttataggtaaaagtattaagaggtagtaggaaaaagtttttattattgggttaaatagtagtggaattggtagttttttaagggaaagttgtataaaagtagaggttgggtgattttttttaataggttttgtagaaattatatatgtattcgtagaggaaatgatgttaaaggtagtttttagttttagatttttgatgttgtaaatatatatgtttgttaagggggaaattagttttgttttttcgttattaaaattttttgtatcgttttttggttataggattttaaaagaggatgtagaaggagttaaggagattgaaattaaagattttattgtttagtattaattgtgtattgattatatgtaaagaagtaatgggaataaaaagaattggatttagttaggagatttgagtttaatttgtttttgaaagtttttagttttagtagtagtagtagtagtagtagtagtagtagtagtagtagtaatagtaatttttgtttttgagtatttattataggtatgtgaagtattttattatagatattttgtgaagtattagattttagattttgttagttttagtattatattaagaatttatgtgttaatttgtagtgggaggggaggtagggaatgaggagttagttcgaattaagtttagatgtagtttatggtaggatttataatttaggataaatagtattgattttattttgagggtattgggaagttattgggggatagatagagggtgattttgtgtattattatttttttttaataaaatatagattaagtttttattgtgtggaaagaattatagttagtattgaggttttagagttggttggtaaatattagttttgaatttaagaggtttttttaattatttgatattcgttgtttatattgaagaaggtatattttataaatgtgatggttattagtatatgtgttttaaagaaagggagtgataagtttaagtttttagattgcgaggttagtttatgtaatataatatattgtttttttagttatagtaagtttttgtagagaaaatagtaaaagattgtgtaaaaagaaaatttttaaatttgtgttttttggtggtatagttagataatggtataggttgttttttgttgtttttgatttagttgagttttgttagtagggtttattttcgatataagagaaaggtatttttttttttgtagatttttttgttttgtgttttggtattataggtattagatttgtgtttttgttatgtttttatgttgtaattgtgtaatttgggataagttatttagtatttttgaattttagtttttttatttttaaagtggaaataataatgatttttatgttatgtggttattgagagtataaaatgaaatttagaggtggtgtttagaagtttttataatagtgtttcgtataaagtggggatttagaaatagataattttttttttttttttttgttattatatatttttttattttaagtttttatattttttgggttttatttttattttttattgttgtttatttttgttttttgttaatatatttttttttagatgtaattgattgagaaggtgtaagattttgtaaatttatatttattataataattttagttttgtgtaaagttgttagagtagtatattgaataaagattttttaggaagttttattatattaataaatttaattagatttaaaattatatatttttttttttgaatgaatatttttataattatttttatataaattttattttagaaatgtttaacgttttatagtttttttagtttgtaaatattttttttattgttttgatatttgattttttattttagtttggagagaaatgatgggattttattttgtttataggtttggagataataatagttgtgagatggtggtattaggaaaattggtttttttttgtaatttaagttttacgggtaaggaaattatcgggtgtgtaagtaaaggagaaatagttgtattggataaagagaaagattgtttttgttggtaagagaggtttagtggggatttggagttgaggtttttttaatttttttaattgttttatttttgaatttttattttttgtattttagtgattaatttcgataaaatcgatattaatgttgagaaattaataaattttgtaatttggtaatatataggattaaatggtaagtataggatttggttaatttagttttttagaaattatatttatatgttttttgttttttatatatttttggagtatttgagttaagaaattaggtttttgagtaagaatttaggttttttttttaaagttttttagtgttattataagtatttattttattttataatttattaattatttatattttttagatttttttatggtagtaatgaggttttttaaagttaggttttttaaaggttttatattttagagaattatttaattaaatgatatgtttttttattttatgggttgttatattttttttatagaatataaatggagtttttaattatttttagttttaatggggtagaaaattaattttaaaattttttaatttttttaaattttgttgtatgaaatttaatttttgttattaatgtttgtattagttatagtatttggatttaaataatagtaattgttgttgttaattttaaaataaaagatatttattgaaggatatatatttatttaaaatgaaaaggaatgttaaagaaatttgtttattttgtatggagaaaaatatggggatagaggtatgaatttattttattttatagataatggttaatagtttggttggaagttttttggaaaggatatgattataaaataagtgataaataagtgtagggaagaggtatatgtggttatttttgtaaatgggtatatgatataaagatatttaggttttatgtgaatatttattaaagaataattttagtagagaagtttaataattagggggataagatgatgtattttgtggattttaggtagttttttttttagatatttttgtttttgtttgatgtgtttatgaagaaagtggttatattagttaggatgaagtttgtgagtgggtttagaattatggatttttatgtattaaagttaatttggttataattttagcggatattaaaattaagattttaatatggtattattttttagaaggatttgtaagttatatgttttgaatttgattatattggattattt

SEQ ID NO: 2209 - DNA, 6526 bp, Artificial Sequence
  chemically treated genomic DNA (Homo sapiens)
tgattttattgatttttattttgattttattaggttttttgtttgggttgagagattgaatttgtagttgtttttttgtttttgtgtagttggaaggtagtttttttattgtagatttagaattggaggttttagaggtaaagggatagtgtattttgtatgtttcgaatttagagtaagagtttaggggagggtggtagttttggtattttaggattattttgttgtaggagtaggggtaggtagtttagtagtatcggttttttaggagtgggtttggatttgttttttttaaggttttagggttttattttagttttgttattagtaggtacgtggttttgggtatatgattgtatttttgggatttagggtttttatgtgtaaaggagggagtggaggggagagagtagtatgttttttcgaaggcgcgatagagtagaagtaggtagaggggaagttgcgggtttataaggtaaatttatggttcgaggggaagttgatagttaggttaggtgttttttagtagggatggggagggcggaggcggtatagttggagttcggattgtggtacgtcgttatcgtgttgtttcggggaatttcgattcgttttttgcgaaagcgttttcgaacgcgaatttagagtttgtgaacgcgtcggtaagttttttatttttttatcgtcgttcgtcgtaggtgggttcgttttaggggttttttttgcgttttatttcgttttttaagttatttagtcgatcgtttcgtttacgttttcgtgattttagatatttataattacgatttcgtttttatgtatatttaacgtacgacggtgtatagacgtgtatttgatttttgcggattaggtgttttaagcgtatagcggttattcgcggaatcgcggttcggggttagtgagtcgtttgtagtttttcgggttaggggattttttagaatttcgggaaagttattcgaagtttattcgggatgcggttttggttttcggtcgcgtgatttcgtttttaggtgtagaacgacgtttttttagggtttatagttgttaggttgggttttgttttcgtatttttcgggaagattagggacggggttatataggtcgtggttgcggagacgttttttcgggttatttcgcgattaggagggagtcgagtcgttcgtttttttcgcgtttttcgttttattttagttagttggttttattttgcgcgggataattgggacgggagggaggcgacgggagggcggcggttttagagagattgcgcgtttgttagcggtaatttgtttaagtggacgggacgggtcgggtcgttgcgggttggggttatcgaggtcgcggtttttattttaattagatttgggatcgcgggggagttcggttcggtcgttaaatcgggttggttggcgttagggtttcgggaggtgcggttcggcggggaagtcgtgatgggaagcgattttgtttagggagtgttttttattattatattttttacgtttaggtagtgatcgacggtttggcggtatttttatagcgggtttatagtacggggttatatacgttttttgagtttagtttgggtatattcgtttgttatcgagggtttaagttagtttgtagttcgcgtttcgttattcggacgtaagttcgtcgttcgttttgttacgcggtcgtatagttcgagttttttgttgtttattgttcgcggggttacgtaatttcggttttgtatatagaggaggaagcggcggggattttttgttatttggaggtttaattcggggaaggttttagtagtgttttttaattttgcgagaggtgacggggtcggaggacggaagggtagttacgttaggtttaggatcgcggttttattcggtttaggtcgttttcgttttcgttttattttattgttgcgggaagcgcggggcgtatagatcgcgcgttattagtttaagttcgttcgacgttttggtcggagatcgtttgcgagagggaggggcggtcgagcgcgcgtttttcgtttgtttgcgggatttggtcgatgcgaagtgataggggtcggagttttgttgtggagtttcggtcgtttggcgttagtcgttttcgttcgcgttttttttttttagtttcgggcggttcgcgaggcgtttttcggggttttttaaaggaatacgtatattcggttttcggggtttcgttaggggagggggtttttgggaagggggagggggtcggtttaggtgggggaggggtttagcggaggttttacggcgtcgttttagggttttttaggtttttttagcgttagttttcggtgagtttcgggtatttttagttggagagtttggttgggggtcgttatagattttttagagcggttgtagtaggattttagggtgatcgcgggatcgcggggcggggcgagtggtgggattttggttcggatagagtttcggaaagttagagggaaggtcggtgttattgtaggtggggtcgtcgtttttagatgtagtcgttgtattgtcgtcgttaggtttttcggttaaataatttaggtttgagtgttttaaattttttaggtttcggatttttggattagttatggatggattaatgaaatggattaatgtttaaaacgtatatatttagatgtatatatatttttataaggataaaagtatgtgtttatatatatatatatatatatatatatatatacgcgcgcgcgcgcgcgcgcgattttgcgaatgtatttacggatttttaggtcggtatttgggttttcggttaaggaaagttgttttggttattatttggttattttatcggttgcgtaaacgtgtttataacgggttttttttcgagaggttatatttcgtttaaggtggagttagtaggtatttgtttgtggaaaattgtagtggattttgtttcgtttgcgtagattgcgtagttcggagttaaagattcgttttggttagagaggaggtattaagagaggtgcgatttagttaagaacgaggtcgtggagaaaattttgtgggggcggcgtttatatatgcggtgatgaggagttgtgagggttttggggtcggtttcgaaaagtagggataacggtcgtagaggttatattgttttcgtcggtttcgaattcgtattgttaggagagattcggtttttaaacgttgtttttaacgtttaataacgaagtgttttgcgatcggtgtgcgtagtgggcgggcgtttgtatgggttaatgttggatgtacgcgtttattacgcggttgtacgggtgggaatgttattcgtggttagtgtatgttttgtttttttttttagaaaacgatttttaggaattagtttgagtgttcgcgttcgagttcgattggaagtaggtgcgtggtcgttttatttttttcgtgtatattttgagttatagttttcgttgcgtatagagggtattatacggggttcgatatatatatatatatatatatatatatatatatatatatatatattattattttatgggggggaaattgaggttgtcggaagatagaaaacgaagattgattatagaagagggggttttaattataggtgttcgtagatattttaatttttttacgcgttatttagtattttttaatttaggagacgtgcgttttcgagagatgagaagaaattaaaaaagtggttggtagggcgaagagaggaagtcggtatttcggaagaaggagattttcgttttcggtatcggatagggcgaaaattcgttgggtcgcgggtggagaattcggggttcgttcgcgcggtgtcgttttgtgtttagcgaaaggtgcgtttatttttttggtttcgaggattcgtttttttcggtcgttggaaagtttagggcggggttcgggtttgcggagaattttaggtttttttcgagtttttcggtgaaggcgggcgcgggtagggggttttcgcgtttttttagcgtaaggtcgcgtttcgttttcgttcgcgtcggttttagtagggttcggttatggttttatttattagttttcgttatttgggattcgttttcggatttcggtcgttcgagtttttcgattcgttcgtttatcggtttcgttttttagtgtttgttgttttttttcggggcgtagggatttttaggcggcgttacgattcggagttgggtcggaggttaggttggggttcgggttagagcggtcgggtttttgggcgcgggagaaggagggcgtttttttttcgttcggggtcgtgttaatgttttgtatttggggtcggcgtgcggttgcgggtttttttttaaggtttcgggattcgggtttttttcgttttaggttttttcggcgggttaggtcggtttttcgcgttttttagttcggcgtaggtagtcgtaggcgcgggcgggcggtgggggtcggggtaggaggaggggtttcggggttcggcggttcgttattggttaatattttattttgttgatatgtttttttattgttgaggttttcgatatttttttttaggttttttttttcggtcggagtttggtttgagttgttaaaatttcgttttcggagatttataattggtttaaaaagcgtaaaattagtaattaaggggggtttggttcgttagcgtaggggattcgagttgggtaggatatgtgagatagttatagttttttagagattacgataagatttaattagtcgcgcgtggttttcggcgtcggagcgggttagtttagttcggtttagttcggtttcgcgtagagttttcgtcgttttcgcgtatagagtcgggtgttttttgcggtgcgtcggacgggaagtttcgaggagtagttgttgcgttcgttattcgggtcgttcgtttatcgcgcgcgtcgtcgttcgggtcgggggttcgagtcgcgcgttttcggtttcggtttcggttttcgggcgtttgggtcggatgtttcgatgagagagtcggcgttggcggttagcgttatggtttattattcgttttacgcgttacggttcgtcgatttttttatgttcgtttttttggcggcggcgtagtttttttttttttcggtattcgcgttgtcgttcggcgcgttggttaagtcgttgttcgattcgggtttggcgggggcggcggtcgcggcggcggcggcggtagtagcggtcgaggcggggttgtacgtttcggtattgggttcgtattcgttcgtcgcgtatttgcgtttttttaagagtttggagttcgaggacgaggtggaggacgattttaaggtgacgttggaggttaaggagttgtgggattagttttataagttaggtacggagatggttattattaagttcgggaggtagggttgtcggtcggttggaaggcgcgcgggcgggcgggcgggttggggtacgggattgtacggattagagtagagttggggattttcggttttcggttttcggttttaggttttggttttgacgttacgtttcgtttttacggataattaagttgatttttttcgtttggtatcggagcgatttttttttaaaataaaaacgttaaaatttttcgaatgaaataaaacgaaaatatattgttaaagaatagttttaatcgttttgagttttagcgtagaggaggtttcgcggtttggttttggcggtttttttcgtttcgcgttttcgtttttttgcgttcgggttcgttttcgagttcgggggaaatttagttttttttagattttgtttcgatttcgaagtttttagtgggatttgggtttagttaattttacgttggttgttcggtttttggtagcgagtttcgggttagtcgagtttttcgttttatcgggttgggagttttttttttatcgcgggtattcgagttttggacgtattcgtcgttttaggttttaaagtttgaagaaagttatagtttcggtttttttatttttcgatttagttatcgagaatttaggtttcgggtttatttttttttttcgaattgtacggttaggatgttttattaggttttgtagtttagtttttaatataaatattttttagatttatttttgggagttttcgttttaagtgggtattttttttgaacgaatttcggggagattaaggagaagcgagaatatttttagagggtttagattttttttttgggtattagtttttattttagattagggagaaagagggtttttagatttgagtataaggtttaaaggaggttgtttaggagagggtttgataggtagaaatgggattttttgggagtaataattataggtggggtcgttcgggtagtgatgagagggtagagtagtcgattataggggaaatagttaggcggtagcggtgtgcgtaacgaggagggataaataaaggaggagtggggttttggaatttagaatagtcggttttaatgggattttttttttttttttttttttagg

SEQ ID NO: 2210 - DNA, 6526 bp, Artificial Sequence
  chemically treated genomic DNA (Homo sapiens)
tttgggagggagggaagggaggagattttattggaatcggttgttttaggttttaggattttattttttttttatttattttttttcgttgcgtatatcgttgtcgtttggttgttttttttgtggtcggttgttttgtttttttattattgttcggacgattttatttgtggttgttgtttttaggagattttatttttgtttgttagatttttttttaaatagttttttttaggttttgtgtttagatttggggattttttttttttttgatttgagatgaaagttgatgtttaggagagaagtttaggttttttagaaatattttcgtttttttttaattttttcgaaattcgtttaggggaaatatttatttgggacggaagtttttagaaataaatttggagggtgtttgtattgggaattgggttatagagtttgataagatattttggtcgtgtagttcgggggaagagggtgaattcgaggtttggattttcggtggttgagtcgaagggtggaggggtcggggttgtggttttttttaggttttaaggtttggggcggcggatgcgtttagggttcggatgttcgcggtggagaaagggtttttagttcggtgaggcggagggttcggttgattcggggttcgttgttaggaatcgagtaattagcgtggggttagttgggtttaggttttattaggggtttcggggtcggagtagagtttgagagaggttgaatttttttcgagttcggagacggattcggacgtagaagagcgagagcgcggggcggaggagatcgttagggttaagtcgcggggttttttttgcgttgggatttagaacggttggggttattttttagtagtatgttttcgttttattttattcggaggattttagcgtttttgttttaaaaaaaaatcgtttcggtgttaaacgagaaaagttaatttggttgttcgtgggagcgaagcgtggcgttagggttagaatttggagtcgggagtcgggagtcgggagtttttagttttgttttgattcgtgtagtttcgtgttttagttcgttcgttcgttcgcgcgttttttagtcggtcggtagttttatttttcggatttggtgatgattattttcgtgtttagtttgtggaattggttttatagttttttggtttttagcgttattttggggtcgttttttatttcgttttcgggttttaggtttttgagggagcgtagatgcgcggcgggcgggtgcgggtttagtgtcgagacgtgtagtttcgtttcggtcgttgttgtcgtcgtcgtcgtcgcggtcgtcgttttcgttaggttcgggtcgggtagcggtttggttagcgcgtcgggcggtagcgcgagtgtcgggaagaaggagggttgcgtcgtcgttagaaaggcggatatggggaagtcggcgggtcgtggcgcgtggaacgggtggtaagttatggcgttggtcgttagcgtcggtttttttatcgggatattcggtttaggcgttcgggggtcggggtcggggtcgggggcgcgcggttcggattttcggttcgggcggcggcgcgcgcggtggacggacgattcgggtggcgggcgtagtagttgtttttcggggtttttcgttcggcgtatcgtaaggggtattcggttttgtgcgcgggggcggcgggggttttgcgcggggtcgggttgggtcgggttgagttggttcgtttcggcgtcggggattacgcgcgattggttagattttgtcgtgatttttggaaaattgtgattattttatatgttttgtttagttcggattttttgcgttaacgagttaggttttttttgattgttgattttacgttttttggattaattgtgggttttcgggggcggggttttgatagtttaggttaagtttcggtcgggagggggggtttgggagaaggtgtcggaagttttagtagtaagaaaatatgttaatagaataaaatattaattaatgacgggtcgtcgggtttcgagatttttttttttgtttcggtttttatcgttcgttcgcgtttgcggttgtttgcgtcggattggagagcgcggagggtcgatttgattcgtcgaaagggtttgaggcgaggggagttcgggtttcggggttttggggaaggattcgtagtcgtacgtcggttttaagtgtaaagtattgatacgatttcgagcggagagggggcgttttttttttttcgcgtttagaggttcggtcgttttggttcgagttttagtttggttttcgatttagtttcgggtcgtggcgtcgtttgggggtttttgcgtttcggaaagagatagtaggtattggaaagcgaggtcggtgggcgggcgagtcgggaggttcgggcggtcgaggttcgggagcggattttaggtggcgggagttggtgagtggagttatggtcgagttttgttggggtcggcgcgggcgggagcgggacgcggttttgcgttggggaaacgcggggattttttattcgcgttcgtttttatcggaagattcggaaggaatttggagtttttcgtaggttcgggtttcgttttgagttttttagcggtcgggaggagcggattttcggggttaggaaggtgagcgtatttttcgttgagtatagggcggtatcgcgcgggcggatttcggattttttattcgcgatttaacgaattttcgttttattcggtatcggagacgaaagtttttttttttcgaaatatcggtttttttttttcgttttgttaattatttttttagtttttttttatttttcggaagcgtacgttttttaagttaaggagtgttgagtaacgcgtgagggagttggggtgtttgcgagtatttgtgattgaagtttttttttttgtgattagttttcgttttttgtttttcggtagttttagttttttttttatgaagtgatggtgtgtgtgtgtgtgtgtgtgtgtgtgtgtgtgtgtgtgtgtgtgtcgggtttcgtgtggtgttttttgtgcgtagcgagagttataatttaaggtgtgtacggggagagtgaagcgattacgtatttgtttttaatcgggttcgggcgcgaatatttaggttgatttttgaaggtcgttttttgaaggaaaagatagagtatgtattagttacgggtgatatttttattcgtataatcgcgtggtgggcgcgtatatttaatattgatttatgtaggcgttcgtttattgcgtatatcggtcgtagggtatttcgttgttgaacgttgggagtagcgtttgaaggtcggattttttttggtagtgcggattcgggatcggcggaagtagtatggtttttgcgatcgttatttttatttttcggggtcgattttagggtttttataattttttattatcgtatatgtgagcgtcgtttttatagggttttttttacgatttcgtttttggttaggtcgtattttttttagtattttttttttggttagaacgaatttttgatttcgagttgcgtagtttacgtagacggggtaggatttattgtagttttttataggtaaatatttgttggttttattttaggcgagatgtggtttttcggggagggattcgttgtggatacgtttgcgtagtcggtgaggtgattagataataattagggtagttttttttagtcgggaatttaggtatcggtttaggaattcgtgaatatattcgtaaagtcgcgcgcgcgcgcgcgcgcgtgtgtgtgtgtgtgtgtgtgtgtgtgtgtgtagatatatatttttgtttttgtaagagtatgtgtatatttaaatgtgtgcgttttagatattagtttattttattagtttatttatagttggtttaggggttcgaggtttgaagagtttgaaatatttaggtttgggttatttgatcgagaaatttggcggcgatagtgtagcggttgtatttggggacggcgattttatttatagtggtatcgattttttttttggtttttcggggttttgttcgggttaggattttattattcgtttcgtttcgcggtttcgcgattattttgaggttttgttgtagtcgttttgaagagtttgtagcgatttttagttaaattttttagttaggaatgttcgaggtttatcgaaagttggcgttggggaggtttgggaggttttggagcggcgtcgtgaggttttcgttgggttttttttttatttaggtcggttttttttttttttttaggaatttttttttttggcggagtttcgggggtcgagtgtgcgtgtttttttaagaggtttcggggggcgtttcgcgggtcgttcggggttggagggggagggcgcgggcgggggcggttggcgttaggcggtcgaggttttataataaagtttcggtttttgttatttcgtatcggttaggtttcgtagataggcgggggacgcgcgttcggtcgtttttttttttcgtaggcggttttcggttagggcgtcgggcgggtttgggttggtggcgcgcggtttgtgcgtttcgcgtttttcgtaatagtgaaatggggcgggagcggggacggtttgggtcgggtggggtcgcggttttgagtttggcgtggttgttttttcgtttttcggtttcgttatttttcgtagggttaaggggtattgttgggatttttttcgggttgagtttttaggtggtagggggttttcgtcgtttttttttttgtgtgtagggtcggggttgcgtgatttcgcgggtagtgggtagtaggaagttcgggttgtgcggtcgcgtggtagagcggacgacggatttgcgttcgagtgacggggcgcgggttgtagattggtttaagttttcggtggtagacgaatgtgtttaggttaagtttaggggacgtgtgtggtttcgtgttatgggttcgttgtgagggtgtcgttaggtcgtcgattattgtttggacgtgaggagtgtggtggtgaaggatattttttggatagagtcgttttttattacggttttttcgtcggatcgtatttttcggagttttggcgttagttagttcggtttagcggtcggatcgggttttttcgcggttttaggtttggttggggtgggggtcgcggtttcggtgattttagttcgtagcggttcggttcgtttcgtttatttaaataaattgtcgttgataggcgcgtagtttttttggagtcgtcgttttttcgtcgtttttttttcgttttaattatttcgcgtagggtggggttaattggttgggatggggcgggggacgcggggagagcgggcggttcgatttttttttggtcgcggggtggttcggggaagcgttttcgtagttacggtttgtgtggtttcgtttttggttttttcgggggatgcgagggtaaggtttagtttggtagttgtgggttttggaagggcgtcgttttgtatttaagggcgagattacgcggtcgagaattaaggtcgtatttcggatggatttcgggtgattttttcggagttttggggaattttttaattcggggagttgtagacgatttattggtttcgggtcgcggtttcgcgggtggtcgttgtacgtttgagatatttggttcgtagaagttaggtgtacgtttgtgtatcgtcgtgcgttggatgtgtatggaggcgagatcgtggttatggatgtttgggattacgggagcgtgaacggggcgatcgattgagtgatttgagagacggggtagagcgtaggaaggatttttaggacgggtttatttgcgacgggcggcggtgggggagtggggggtttgtcggcgcgtttataggttttgggttcgcgttcggaaacgttttcgtagggagcgggtcgggatttttcggagtagtacggtgacggcgtgttataattcgggttttagttgtgtcgttttcgttttttttatttttgttaaggggtatttggtttggttgttaattttttttcgaattatgggtttgttttgtggattcgtagttttttttttgtttgtttttgttttgtcgcgttttcggaagggtatgttgtttttttttttttatttttttttttatatatgaggattttgaattttagaggtgtagttatgtatttaaggttacgtatttgttggtggtagagttgggatgggattttgggattttaaagagagtaagtttaaatttatttttaagaagtcggtgttgttgagttgtttatttttgtttttatagtaaggtgattttgagatgttagggttgttatttttttttgggtttttgttttgaattcgagatatataggatgtattgtttttttgtttttagagtttttagttttaggtttgtagtgggagggttgttttttagttatataggggtaagggagtagttgtaaatttagttttttagtttaggtaggaagtttgatggagttaggatggggattagtggggtta

SEQ ID NO: 2211 - DNA, 5928 bp, Artificial Sequence
  chemically treated genomic DNA (Homo sapiens)
ttgagtaaataatattgtgttattagttattattgttattatgtttttttttatgttgtatgtttttgttttagtttattttttgttgttaagttgaaattggttatttataagaaatgaattttattttttatagttttggagattgggatgtttaaggttgaggggttgtattttttgagcgtttttttgttggtggggatttttagatgtgttttaaggtagtttagggtattttatggtgagggcgttgagtgtgtttatgttttagtataggtttttttttttataaagttattaggtttttttttataataatttatgaatttattattttatgaatttattaatttatgagtggattaatttatttatgagagtagagtttttacgatttaattatttgttaaaggttttattttttaatacggttatattggggattaagtttcgatatgagtttggagggatatttaaattatagaagtttttttttttagttgttttaagagttttttaaattatcggatttttaatagacgaattatgttgtgttttgatgtgatatttttggtatttattttttttgaagttttttgagtttttaagatttgtaggtttatattttttattaattttagaaaaatttaatgaatatttatttaatatttatttttgattaagtatttttttaaaagatttttttttttttttttttattggtatattaattatatgtatgttagattgtttgatattgttttatcggttattggaattttgtttatttgtttagtttttttttattttatgttttagttcgtatagtttattttgtattggttttattttaagtaaattgattatttttttgtagtatttaatagtatttaattaaaaatttatatagtgtattttttattttagatgttgtattttttatttttaaaatttgtatttggttaatttttagtttttatttatttattgagatttttttttgtttttttattatattatgttttttttttaatttttgaatattttatgttatgtttaagtttgtttttgtttattgatttttttaatgattatgggttatattttttagttttttttatatatttagtaatttttgattttttgttagacgttagggatgttatgttgtgtatttaggttttgttgtttttattagtaaagtgttgaatgttttgtttttttaggtagtgttatcggttgaattattttttttaaatttatatatgaagttttaaattttattatttaagaatgtgattatatttggagatagtgttttaaaaggggtaattaggttaaaatgaggtttttagggtgggttttggtttaatttgattggtgtttttataagaaaagagtcgttagagatgtgcgtgtatagaggaaagattatgtgagatatggggaaaaaaagttatttgtaagtagaaagaggttttagtagaaattagatgtgttgatattttattttggatttttgggtattagaattgtgagaaagtatatttttgttggttaagttatataatgtgtagtattttgttatagtaatttgagtgaattaatataagtagttaatttatttgtaggttaatttgatttttgtaagatttgttttaaagttttgttcgaatggattttgagtagtttttttttagaaagattagttttttttttacggtatggtttttattgaatgtttgaagtggttaatatttttggttgttttgagtttaaatgttttttagttttacgaattttatattagttgtttagtttagtttttttagtgattgttttgtttttaggggttatttagtttggttttgtgggtacgaatagtatagtatttgatgaaaagtttaaaggatatatttttatatttttggagttttttttttttattttgataattcgtttgttttagaagtttttaattttgatttttgtttttttagttcgatgggattttagtgttatttgggtttttttttttgtgttgtagtttggagagcgtttttaggaaattaaggtagttatgggattttttttattgtttttttttttttagggatcgttgtttggtattgtttgttgtttagtatttgtagattgttatttatgtagttttagagttatttatggtgggaggttagtttggtattagtgattttatagttaaaagcggaagtttatatgggtgatagttgaggtggtttttatttgttgattttttatgtgaattgatggaaagtattatttttaaagtgtgtaaaatggaagtgagtaggggtggagaaggataaatagaaagaggagggcgttagttttgagtgtttggatggcgttgagattatgcgttgagagtggtaataatttaaggtaggtgtcggttatgttaggtagatggtataggtatagagatagtgggaaatagtagtgaggaagacggtgggtgaagtgagtattgtggaaattaggttggagaagtaggaaggaaggatagataggagggggtttataggggaataggggattggagggttttaggatttagataaagggagaatgttaggagtttaggatattttgggtagaaaggatatttgtatatttttttttagaggtggagtttaagttttgagtgtggttatgggagggtggtagaagtggtagaagtggagtggagatggaagtttttagagatgaggaaaaataaaatttgagcgattgtgaattttgatgaaatatcgatcgttatgttgaagatggttgggatgtggttaagttttagtatgataaggaatatagtgaatttagtgttgaaatttttaacgaaagggataggttgtataaaggtcggtagatgatagtagggtagggatttcggatatggcgttttttttagtttgtatttttaaggaggatggtttttgtatgagggtgaagatttggggtttaaagttaatgtttagtttttagtttgagtttatgtgatggggacgtggttattaagtatagttgtggaggttgtgaatagttttatttttaattagcgatgttattttattgtagacgttttatttcgtgtaatggttttttaattttgtgggtatttagtgtttttgcgtgggggtttgagtaggattttagggaagtatgtttatgataatataggttttcgttagggttaggagagtgagagaggttgagaagtggttttttttgtatgggttaggtggtcgtagtaggaattttgaaggggttgtagtgagcggtgggaagtcgagttgatggggaggaagtagagaggagaggtgggtgggaatatgagagaaaataatgatttagttatttatattatgatggtgattaaagtgatagggatgtagaataaggaaattgattttgttagagtttttatggatcgagtttttgtggttgtttagtggtgaatagttagtagagagtttggaggtatttgattcggatttagaggagttttggaggatggagtttggaggacgggggtttggagaatgagggtttggaggacgagggtttggaggaataggggtttggaggacgagggtttggaggaagagggtttggaggataggggtttgaaagatgggggtttggaggatgagggtttggaggatgagggtttggaggagtaggggtttggaggatgagggtttggaggataagagtttggaggataggggtttgaaagatgggggtttggaggatggggtttggaggatgggggtttggaggacgggggtttggaggatgatggtttgaaggatgaaatttggaggatggagtttggaggatggagtttggaggatgagggtttagaggatgggggtttggaggataggggtttagaggatggagttttggagaatgggggtttggaggatggagtttgggggacgagggtttggaggatgggggtttggagtatggggtttgttttttagattttgaggatagtttcgtggtggattaaggattttgggttttttgcgtttttgggtttttgattgtttaattattagaaatagattggtaattttttgttatttttttggcgtggggaatttcgggttttttttgttttttttattatattttttttttttttttttcgggtgtttattttttggtttttgttttttttgttaggtttatagaatttttttttagtatattttattttaggaaggttatgggttgggttttaggtgttattttttagaagatgtagagtatttttatggaataaaaataatttattttaggggttggttgaaaatgaatttattaaaatttgtttgttataggttatttcgttgattttgttagttttatttttatggagagtagttttttttgttgaagatgggataaagggtatcgtgttgcggttggggaggttttaattatagttttgggagtagttttttattttttttgagatgttttttttttttagggaggggatttttttatgttatttgttggtttgtatattttttttagtaaatttggttttaatattttttaaatttttgtggtttttgtttattttattaatagaaatgtatagtttatttttttttgggtgtgattttgtgtgtgtttagttttagatttgtacgtggtcggttttttacgttggtagtttggtatgatttaattttttgtttagggtaggaagaggtattatcgagtagggagagagttattttggttcggaagtttcgtttgtatagggtatagttgttttttgtttttttttcgtttttacggtggaagggttggggttacggggtagagaagaaaggttatttttgtttgttggataaatagaggggagattataaaatatattcggtagtggatattatgtattttgtaagttattttggggtgtagttgagttagatatgggacggcgagacgtttagtttttggtagcgtttttcgttttggggttatgtgttttggcggggagtgagaaattttgtaagtgaaggagagggtttttttatgtgttttttttattttttttaaagaaaaaaaaaaagtataattataaattaatttgagagggggaatggttataaaggtatttggtaatgtgtgttgtttatatgggatttgttattgtttaggagggtggttttaagaagggttttttttttagggaaaggttgagtgacggtaggtgttagcgggtttcgtgtcgggttaggagggtatttttattaagggtttttggagttttagagtatttatttttcgtttggattttggttttgggtttatttgtttatttttttttaggagggttttgtttttgttttttttcgagataggatttggttttgtcgtttaggtaggagtgtagtggtgtgattttggtttattgtaatttttgttttttaggtttaagtgatttttttattttagtcgtttgagtagttgaaattatagttgtggattattatgttcggttaatttttttttttgtattgtttgtagagatggggtttcgatatgttgtttaggatggttttgaatttttgagtttaagtaatttgttcgtttcggttttttaaagtgttgggattataggtatgagttattatgtttggtttttttttttttttttttttaaattaatataataattttagtaaagttttatcggttttttaggaggaaatcgtattgtttaaatatgggtaagataagattttgtgtttttttatgtggtaataagatagtagaggtattttttagaatttttgagagaaggagtagtgtggtttggggtattagggtggggtcgattgagggtttttttatagt

SEQ ID NO: 2212 - DNA, 5928 bp, Artificial Sequence
  chemically treated genomic DNA (Homo sapiens)
gttgtggaaagatttttagtcggttttattttggtattttagattatattgtttttttttttagaggttttaggggatgtttttattgttttgttgttatatagagaaatataaagttttattttgtttatatttaagtaatgcggtttttttttgagaagtcgatagggttttgttgaaattgttatattagtttaaaaggaaaaaaaaaaaaaagttaggtatggtggtttatatttataattttagtattttaggaagtcgaggcgggtagattgtttgagtttaggagtttaagattattttgggtaatatgtcgaaattttatttttataaataatataaaaaaaaaaattggtcgggtatgatggtttataattgtggttttagttatttaggcggttgaggtgggaggattatttgagtttgggaggtagaggttgtagtgagttaagattatattattgtatttttgtttgggcggtaaagttagattttgtttcggaaaaaaataaaaataaaatttttttagaggagggtgaatagatggatttaaggttaagatttaggcgagaggtgagtgttttgggattttaaggatttttggtgggaatgtttttttggttcgatacggggttcgttgatatttgtcgttatttagtttttttttaggagggaggttttttttggagttatttttttgagtagtggtaaattttatgtgaataatatatattgttagatgtttttatagttatttttttttttaagttaatttatggttgtgttttttttttttttttaagagaaataaagaaagtatataaaaagatttttttttttatttatagggttttttatttttcgttagggtatatagttttaggacgaggagcgttgttaggagttgggcgtttcgtcgttttatgtttagtttagttgtattttagggtggtttgtagaatgtatggtgtttattgtcgggtatgttttataattttttttttgtttgtttaataagtagagataattttttttttttgtttcgtggttttagtttttttatcgtggaggcgaagaggaggtaagaggtagttgtgttttgtgtaggcgaggttttcgggttagggtgattttttttttgttcggtgatatttttttttgttttggatagagagttgggttatgttaggttgttagcgtggaaaatcggttacgtgtaggtttggggttgggtatatatagggttatatttaggaagggataagttatgtatttttattgatagagtgggtagggattataggaatttagaaaatattagggttaagtttattggggaaaatgtataggttagtagatagtatggaaaagttttttttttgaggaagggaagtattttagaggaggtaagagattgtttttagggttgtggttagagtttttttaatcgtagtacgatgttttttgttttatttttagtaggaggggttgttttttatggagatgaggttgatagggttagcggagtagtttgtgataggtaggttttaataagtttatttttagttaatttttgaaatgggttatttttgttttatgggaatgttttatattttttgaaagatggtatttgggatttagtttatggtttttttggggtaggatgtgttggagaaggattttgtggatttgatagagaagatagaagttagagagtagatattcggaaagaaagagggaaaagtgtggtgggaaggatagaggggattcgaagttttttacgttagggaaatgatagggggttgttagtttgtttttgatggttgagtagttaggggtttagagacgtaggaaatttaaaatttttggtttattacggggttgtttttagggtttggagagtaggttttatattttaggtttttattttttaggttttcgttttttaggttttattttttaggtttttattttttagggttttattttttaggtttttgttttttaggtttttattttttaggtttttattttttaggttttattttttaggttttattttttaggttttattttttaggttattattttttaggttttcgttttttaggtttttattttttaggttttattttttaggtttttattttttaggtttttgttttttaggtttttgttttttaggtttttattttttaggtttttgtttttttagatttttattttttagatttttattttttaggtttttattttttaggtttttgttttttaggttttttttttttagattttcgttttttaggtttttgtttttttagattttcgttttttagatttttattttttaggttttcgttttttaggttttattttttagggtttttttgggttcgggttaagtatttttaggttttttgttgattgtttattattgggtaattatagggattcgatttatgaaaattttggtaaggttagtttttttgttttatatttttgttattttagttattattatgatataagtgattgagttattgtttttttttatatttttatttattttttttttttgttttttttttattaattcgattttttatcgtttattgtagtttttttaggatttttgttgcgattatttgatttatgtaaaagagattattttttagttttttttatttttttggttttggcggaagtttgtgttgttataggtatgtttttttggaattttgtttaggtttttacgtagggatattgagtgtttatagagttgggaaattattatacgagatgggacgtttgtaatagagtggtatcgttagttgaaagtggagttgtttataatttttataattgtatttggtggttacgtttttattatatgggtttagattgggggttggatattgattttgagttttaagtttttatttttatgtaaaaattattttttttggagatgtaggttgggaagggcgttatgttcggagtttttgttttgttgttatttgtcgatttttgtgtagtttgtttttttcgttaagaattttagtattgagtttattgtgttttttgttatgttaagatttggttatattttagttatttttaatatggcggtcgatgttttattaaaatttatagtcgtttagattttatttttttttatttttaggaatttttatttttattttatttttgttatttttgttatttttttatgattatatttagaatttgagttttatttttgaaagagggtatgtaaatgttttttttgtttaggatgttttaagtttttaatattttttttttgtttgaattttaaagttttttaattttttatttttttgtgagtttttttttgtttattttttttttttgtttttttagtttgatttttatagtgtttattttatttatcgttttttttattgttgttttttattgtttttgtgtttatgttatttgtttagtatggtcgatatttattttgaattgttgttatttttaacgtatgattttagcgttatttaggtatttagggttggcgtttttttttttttgtttatttttttttatttttgtttatttttattttgtatattttggggatgatattttttattagtttatatagaaagttaataaatgggaattattttagttattatttatgtggattttcgtttttgattatggagttattggtattaggttagttttttattatgagtaattttaaaattatataagtaatagtttgtagatgttgagtagtaggtagtgttagatagcgatttttgagagaagggaaataatagggggagttttatggttgttttggttttttggagacgttttttagattatagtatagggaggggaatttaaatagtattgaagttttatcgggttgaggagatagaggttagaattggaagtttttgaggtaggcgggttattaaggtaagagaaggaagttttagaaatataaaagtgtgttttttgagttttttattaaatattatgttgttcgtgtttataaggttaggttaagtagtttttggggatagaataattattggggaggttaaattgaataattagtgtagggttcgtggggttggaaagtatttgagtttagagtagttagaggtgttgattattttaagtatttaataaaggttatgtcgtaaaaagaaggttgatttttttagaggaaagttatttaaaatttattcgaataaaattttaaaataagttttgtaggaattaagttaatttgtaagtaaattaattgtttgtattagtttatttaggttgttgtaataaaatattatatattgtgtagtttaattaatagaagtgtatttttttataattttggtgtttagaagtttaagatagggtgttagtatatttggtttttattgaggtttttttttgtttgtagatggttttttttttttatattttatatggttttttttttgtgtacgtatatttttggcgattttttttttataaggatattagttaaattgaattagggtttattttaagagttttattttaatttgattattttttttaagatattgtttttaaatgtagttatatttttaggtaatggaatttaaggttttatatatgaatttgggggaaataatttaatcgataatattatttgagagagtaaagtatttaatattttattaatgaagatagtaaaatttaaatatataatataatatttttaacgtttaatagaaaattagaagttattagatgtgtggagagaattaggaaatatggtttataattattagaaaaattagtgaataaaaatagatttagatatggtataaaatgtttaaagattgaaagaaaaatataatataataaaggaataaaaaggaattttagtagataaatggaaattaaaaattaattaggtataaattttagaaataaaaaatataatatttgaaatgaaaaatatattgtatgggtttttgattagatattattagatgttgtagaggaatggttagtttatttgaagtgaagttagtgtaagataaattatgcgaattagagtataaagtgaaaaagggttaaataaataaataagattttaatgatcggtgagataatgttaagtaatttaatatatatgtaattgatgtattagtaggagaggagagaaaaaaattttttaaagaaatatttgattaagaatgagtattgagtaaatatttattagatttttttgaagttggtgaaaagtataaatttataaattttagaggtttaaagaattttaaggaagataaatattaaaaatattatattaaggtatagtatgattcgtttgttgaaaattcggtgatttaaaaaatttttaaagtagttggaggaaaagatttttataatttgaatgtttttttaaatttatgtcgaaatttaatttttaatgtggtcgtattgagaggtggggtttttaataggtgattggatcgtgagagttttgtttttatgaatgaattaatttatttatgaattaatggatttatgggatgatggatttatgggttattgtggaaggggatttggtggttttataagaagagagatttgtgttaggatatgaatatatttagcgtttttattatggaatattttgggttgttttgggatatatttgagagtttttattagtaagaaggcgtttaagagatataattttttaattttggatattttagtttttagaattgtaagagatgaagtttattttttataaatgattagttttaatttagtaatagaaaataggttaagataaagatatatagtatggaggagaatataataataataatgattgataatatagtattatttatttaa

SEQ ID NO: 2213 - DNA, 11691 bp, Artificial Sequence
  chemically treated genomic DNA (Homo sapiens)
ggaagagaggaagttaaattgtttttgtttgtagatgatatgattttatatttaaaaaattagtttttttagttttaaatttttttaagttgataagtaattttagtaaagttttaggatataaaaattataagtatttttatatattaataatagataaatagagagtaaaattatgagtgaatttttatttataattgcgataaagagaataaaatatttaggaataaaatttataagggatgtgagggatttttttaaggagatttagaaataattgtttaaggaaataaaagaggatataaataaatggaaaaatattttatgtttatggataggaagaattaatattgaaaaatggttatattgtttaatttatagatttaatgttattttaattaagttattattgattttttttataaaattagaaaaaataaattattttaaattttatatggaattaaaaaatagtttatatagttaaggtaattttaagtaaaaagagtaaagttggaggtattacgttatttgatttttaattatattatgaggttatagtaattaaaatagtatggtataggtagtaaaatagatatatagattaatggaatagaatagaggttttagaaataatagtatatatttaaaattatttgatttttgataaatttgataaatataagtaatggggaaaggattttttatttaataaattatgttgggaaaattgattagttatgtgtagaaaatagaaattggattttttttttatatttaatgtaaaaattaatttaagatggattaaagatttaaatataagatttaaaattataaaaattttagaagaaaatttaggtaatattatttaggatataggtatgggtaaagattttatgattaaaatattaaaagtaatggtaataaaagttaaaattgataaatgggatttaattaaattaaagagtttttgtaaagtaaaagaaataattattagagtgaataggtaatttatagaatgggagaaaatttttgtaatatatttatttgatagaaggttaatatttaggatttataaagaatttaaataaatgtataagaaaaaaataattttattaaaaagtggacgaaggatattaataggtattttttaaaagaagatatttatttagttaataaatatatgaaaaaaagtttattattattggttagttagaatggtgattattaaaaagttaggaaataatagatgttggagaaataaaaatttttttatattgttgttgggagtgtaaattagtttaattattgtggaaggtggtgtggtaattttttaaggatttagaattagaaatatcgtttgatttagtataaattattttatataaagacgtttttatacgtttgttacggtattatttataatggaaaagatttggaatttatttaaatgtttattaatgatagattgtataaagaaaatgtggtatatatatattatggaatattatgtagatataaaaaaggatgtgtttatgttttttgtagagatatggatgaagttggaaattattatttttagtaaattaatataggaatagaaaattaaatattatatgtttttatttataagtggaagttgagtaatgataatatatggatatagggaagggaatattatatatcggggtttgttagggggtgggaggttaggggagggatagtattaggagaaatatttaatgtagatgatgggttgatgggtgtagtaaattaatatgttatgtgtatatttatgtaataaatttgtatgttttgtatatatattttagaatttaaagtataaaaaaataaataaataaatagtatggaaaggtaggggtagaaagtaattttatagtggagaaatttaataattattattttagttaggtgtttaagattaatattagtagttataaattatgttggtagtatgtatttttgttataatgtgataaaaatggtattttaattttgttatttttttttttaaattttataattttggtttaattatgagtaaaaatattagataaattttattaaggggatattttgtaaaatatttgattagtattatttaaaattgttaagattattaaaaataagaaaaatttgagaaattgttatagttaagggaatttaaggagagatgataattagagtaatttggtattttggatgggttgttagaatagaaacgtgttggggaaaagataaggatatttgattaatatatggattttagttagtaataatgtattaattttggtatattaacgataagtgtattatattaacgtaatatgttaatagggaaattgggtgtgaggtgtatgagaagtttttgtatatttttttttatttttttttaaatttaaaattattttaaataatggggttaatttttttaaaagaagatgtttttattagaaagttaggattatgggtttattaagtagatgtttatagtaaattttttgttgaattatggggggaggagatttgtaaatggtgttttataaatttttgttttttaattttaagaaagttggatttttttaaaaggaaaaagattttgtatggtatatagaagttggtgtatggatttatttttatattaaatttgttattatttagaattagatagtatttttgagtaaaaatttagatatttgattttttttgtaatttatgtattttatttgttttttgttttttttttttttaaaaaaaaaattatatacgttattatttagttatggtttgttgtggtatatagttatatagttatatagttatttatttgtttaatattttttttttttgaaagtaataattttttttttttgggagttatatttgttcgtttttattatttaaattatatggttttattaatatttgttatgttattatatttttttatttttgattttagattggttttgggtttattaaatttatgatggttttttataatttttaatttaaatggattggtttaaaaggtgttttttgttttatgttaaaattattagagttagttttaagttatttaagtttggattataaagagaagtagttatattattttgattgaaaaatttttaaggtttaaaatttaggatagtttattgtttatgtattatgttatgtagagaagattgggttatattgagagaaaataaagttgtttaaggagtgtagttataatgagaaatatttggtggtgtttagtttattagttttagttgtttttgagaattaatgtaagtttgtttttgttattttagattgttttatatattttagaataaataaattgatgatttaaatttgttagagttggtttttaattttagtatttaacgaaagtttaaagtattaagtttaggtaatattttaggttgttattttttaagataggaatttgttgaatttagagtttttttttttaagggttttagtaggtttttaattttagtttgttttttgaattgtgtgatgtagagtatattttgtattttatatttaaagtatagtaggatagtatattttaaagaattaaatggaaataaatgaatttttgaaaaacgtgtttaaaaatgcgataaggattagaagtttagttttaagattttttaaaattatgtatttatataaatatatatatatatttgtgaatttaaatggtttatggtatgatttataagatatatgagatttttattgattaaaaattaaatgtatgttaatatttgtaaagtgttgtgagaaaaaaaggttatgtattttattagtgattttaatgaaatttaaagtataataatatttattatttaattattatatggttatttataatggtgtatattgtagttgtgatttgttatagataaaattagataattttttagattgtttttgatggagtatttgtttttgtatttgtgaatgtttgttgataagatttcgtttttttttttgattggaagggtattggtggttgagaataggaaggaagtaagtgttttttttttttatttttttgtgttgtatgattattatatttttttttttatttttaaatttaaagaagaagtcgtttttaaaaaaataaaggtgatttattttttttttttttttttttttttttttttttttggcgatagatttttaaataacgttgaaataggaaaagttttatttttttattgaaatttgatttttttagagtgtaagagtgatggtttattatttagagttatttttttgtgaaattttttgaattagataattttttaaattgcggaataatgaattgggaaagaggattaattcgaatgttagatattttttttgttttttgttttggttgtttgttattttatagaaaatttggttaggaaattgatgtaaataatgtattttttaaaggaaataaagatgaaaattttgaaaatgtgttttttttttaaaagaagaattagagtagagggaaagataaattaggaattaaaagttgtattaaagaaataatagaaaaatgtttaaataattattggttttgattgagaaagaatagttgtgcgaaagatgtggaaagtaaaattgtatatggaaatggattttaatatatatttcgttatattgattagcgtttatttatgttttttaattattgttttttttatttatatttttaaagttgaaatatgatttgtttgtttgaatattaataaatatatgtattgaatgtgtttgtttataattttgaatattatatatatattttaagtatgatttattgagtatgtatagagaaatgtatgtgtatatatataaaatggtatagaaatttgtatatgaggtatatatatgatgtttattagtttgtaaatgagtgtatattaatattttatttattagatatgtatgggttttgtattttagagatgatttatataatgaagaaagtatatgtattttgggtttttgtatgtttgttgtttaattttgtttttgttttttttaatgttgattttgaggaagatgaagaatatataattattataggtaaaatattagaagtaattatttttttaagttagttaaagtttttaattttaatttaaaaaatttattatagttttttattgtggagggaaattagttgttattgaagtgatatttttttttggaaatttattatatttaatgtatgtgtgtgtgtgtgtgtgtgtgtgtgtgtgtgtgtgtgtatatgtatatgtgtgttttaaatagttcgaaattaagtaattttagttgaaatatttttttttttttttttagtatataatattaaatattggagtagtttcgggttattgtaaggagtaaaatgttgtaaaaataattttttatgatatttgatgttattttttggttaggaaaagtgtgaggaggaaagggaattttagatatttgaggttttagttatttttttttttttttttatatttttaaaattaaaattttttagttgagattaatataaaaatttagttaattaggatattaaaggatttagtaatataagttagatttaattttataaaattttgtgtttaaaaatgagaatattaataataaaaaatagagtaaggagaagattgtatggtgatggttattgtggatatatattttttttaaagtaatattttgtggtaaattagtaaattgttgatagaaattttaagtattggtattaatgagagaatattaataaaatgatagtttatttttgtatagtggtttaagatgtaaaaaagatttttataaatgtatttttatttgatagttttaatagttttttaaaatgattgtgtttagtgtattttaataaagtttgaataaatatattttttgggtttgaatttgtggaaggtgttagagaaataggtatggttgagatgaggtgtttaagaattttattgttttttaggggagtgtgaagggtggatagtttattttcgtataaagtagtatataaagtgatagaagtatggagagtgttgttgttgatgggaagaggaaggagatttaattaagtttggttttttgagggttttataaggggaagttatgttataaaaattttttagagatgaagtattatttagtaaaaattttaatgtatttttttgaaaataagaatttgaatattatgagttttaattttttattcggttttttttttaaaaggtggtgggttaaaattttaatattttggaggttatagaaataaggaaggtggaggataaaataagttttaatagggaaaaaataggtaattttatttgtgggaagtgagaagtaaatagatttaagtgttttttgtatttgttttagtttaattttttttaattggattgagaaaatgaatattggttaattaggaagtttttgaaattgtggttgttgttattgttaattaataatttagaattaagttattagtaattaagttagaatttaaaattattataaggtagtttttaaatttaggtggtaataaagaattttgatatttaagttagatttaaagatttttttattaattagttgtagttttatttagttttattttgtttttgtttaaaattaatttttataataattttattttatatttgaaaaaattttatttaggagatataatttattatatgatgttaagattataatattattttatagaagtatattatttaattgaaataaggtatttttattaatagaaaaatatattaaattttattgttttttttataagtaaatagtagatgatttttttaatagttaaattagtagggaggataatttagaattaacgtttagataaggtaaaaatgataataaaaagagtagtgataagttttttaaaataattttattgggttaggagagagaaaattaagagtgaatatttagtgaaaggtaagtattttttgtaggatttagaattagatagatttgagtttgtaggtgtagtttgttatttagtatttttgtgagattgaataagttaaattttttgattattagtgttttaagttgtaaatgaataatgtaaataattaattttttatgatttttatataaaaagtggaaaagtatttggtatattttttgatatagagaaggtaaaaggtatatgtgtttgtttttttttgttagaaaataaaataaaataaaataaaattttttaattagagtttagtagtatgtggatttttagatggtaagttatttgaaagttttagatttgtaaataagttttaagaggatgagtatttttatagttaagggtatgatatgtttttaggtagtaaatattatagtaagtttttatttaatattttaggatatggggcggggggagggaaggggaaggtaggattgtaatttttagattatgagatataaaatttatgatattaaaggtaaatgatttaatataaattataattttatttatatgattggattagattaaattttttttagattgttttttatgtgttttgtttttttatggtcgttggtagataattattatttttgtaaatattttttttaagttttaattttaagttttaggaaagttatcgttgatttttttaggttaatttaggtattttattgtttattcgtatagtatttaggattttttgaatgtttatgtaagtttttagtgtttatatgttttatgaacgaggggttgttgttatttaatttattgttatatttgtagtgatagtatagtgtttgacgtatggttaatatttaattattaatatttaaaagggtttatttaaaataagaaatgaaaatcgaggtagatttttattttttttgggtgaagtggtatggtattgtgggttatatagtatatttggttattgtttgagtttagggatgttgtgtttaggtgtgggttgtaagattattgtataaagaatattttaatataggatttttataagaaatatattaaagtgtgaataaagataaataattatttaataattaataaaatataatttataaaagttaatatttagtgttttttttagaaaatttttataaaattattatttatttttattattgaaattatttttagttttataaaggtgaatgtttgaaaaaaaatgttgttgattgagtggaaattatataattaaaatcgtatgtttgatttaaatgttattttaggaattttagttatatgtttgtgataatattatgtagttattaagaatgtgtgagatagttgttgtaaaattatatgaggattaattttaaatttattatttatggtatgaatttaagttatttatttaatttttgaaagttattttataatttataaaatgaagataataatgtttaatttagtaggtggttatgattattaaagggtataattataaaaatgttaagggtattgtaattatttagtgagtaatattagttattgttgttaggtataattattatagcgagtttattagtttttgtttttgtggtgtattgttattatttgttggtaaaattatttaatagtagattgaattagaggtgattatatttttaatgtagaaaatggaaaaaagatttagtttgataataaatattattaaatatattaagaataaaaagtagaaaaattattaattagtatttgataaaattattgatttatgaaaaatgatttttttgaatatatatggtaatgtaggtattaggtaaagttttttgtgttttgtagatatagatttttatttaagttttttatttgaaatattattttaataatttgtttttaaagttttaaagttatgttaatttgggaatgaataatattatattatatgagaatttttatagtaatttgagataatggtatatagttgtaaaattaaaaatgttagaatatttttatttttgttttgttatgtgaattttggggttttatatttaaggagttgataggttatatttttattggttttaaaataaatatgtttagagtttagaaatttacgatacgtaatttgatgatatttattgtgggtttgttgtaagttagatatattatttagggtttttatattaaattttttggttttttataaaaatttaaaatgttagtttggtattttaaaatttttaagtaaagataaaaagatataaatagtatttataattatttataaatgtgttatttagaaaaaaaaatttaatgatttttaaaattgataattataattttagtgatagagaaaatgtgttttaataagttattttggtttatatatttttcgatttttagaaagtatttttagtaatttttaattatatttgttatgaatttttattaaaaagtatttgtgtatttaatttaagaaaaatggaaaattttattatgaagtgtttatatttataggtattagaaattttttatatgtttgagagattttttaaagtaaattatcgtattttagatatgtttattaatatgaaatgttagataaaggatttgaaaaaaaaaagaaatgatatttaaatttgttaatgtttattaatattttttaatttattttgatataattatttgtatatatattatagatatttattggatttagtgatattgttattggtttaaaattattttaaaaattatgttggtaaatataaatattatattttgttaattgaatataattttagaaaaatttgaagatatataaatgtatatgtgtataaaatttaattttagttaaagatttgattaatatttttatttgttaattagttattttatgataattgtgtttggtgttgaaattattttcgtattataataattttttgttatatgttattttaagttaataaattttggatttgaaaaatatatttttttattagttttgttagtttaatttattttaattgaaaaaaataattaattaatttattaaatagattaaaataatgagatggtattatgtaaatttaattagtatttttaaaaattgaaagtagtgttagtagttgagataaaatttacgtgtttaaaaataattagtgttatatgaattaaatagtatgaaaatgttaatttatgtatagaaagttgtatttttaatttttttaagattgtaaaggttatttataattttatgatttatataaaaaattaataatattattttaattattttgttataaaaagttttaatattattaaaataagattaatatttgttattaatttaaaattgattattagaataataatatattatgggtggagtgtaattaataaaattatttaatttaatttttattatatatatattttttgttttaaaaaatttatattttgaaattataggaaatttaaaattgattttttttgagataattatattttaaaaatttattttgtattttatgttttaaaaatattttatgtgaaaatattaaagttttattttttttttgttgttgtttaaagtaaattattttagaatgtatgaaaatatttttttttaagatatttatatttatttgtttaatttaatataatattgttgttttttagaggtaaaattggtttcggttatttataggttttaatattttttataagagattaataaattaattgttaaagatatagaaaatatatagatttaatatgtagaaaatatttaagaagtattatatggtatttttgttattatttttttggttgtattatttataatttttagtgtttatttttattggtaaataaatagattttatttaatattaggtttttattaattttattggatttgaaaaaaataaaatgtttaaaaaatttagttgagttttttttatttttatgtttatttttaggatagaaaattttgttatgaaaattaggagttaaatatttaaagaaaaaatatataacgtgaagttaaaagaattgttttattttatttaaaatatagaaagtattatttatattattttaatattattaaaatttaagtatggtatggtaagttaaaataaaaagtattatgaagtatattttttagaatattaaatatataaatttttataattagggaaaatggtttaatatagtgttatatatatatgtgtgtgtatatatatatgtgaatgtgaatatgttgttgtttttaaagggttgttttatgtgtaaaaagtgatataagtgtgggttagggagagaaatttaaagaattgtttattagttgagttaaaagaggtttattgtggatatatttatttgaatgaagttgttttataattattatttaatttttttttagttcggttggtacgatttaagtaatatttttttaataagagtttagaagttgtgttttatttggtgaatttattaattttatttattattttgataattgaataattttttatagttttttagtatgttttattgtatttttttttaaaattaggatatattaaaaaggaaataaagaatattattatagtgttgatggagattatatgttatattttttatttttattttataga

SEQ ID NO: 2214 - DNA, 11691 bp, Artificial Sequence
  chemically treated genomic DNA (Homo sapiens)
tttataaagtaaaaataaaagatataatatgtaatttttattaatattgtaataatgttttttattttttttttaatatgttttgattttaaggaaaagtataataaaatatattaagaaattataaaaagttatttagttattaaaatggtagataaagttaataaatttattaaatgaaatataatttttagatttttgttagggaggtattgtttaaatcgtattaatcgaattgggagggaattgagtagtagttgtaaggtaattttatttaagtggatgtgtttataatagattttttttaatttagttaatggatagttttttgaatttttttttttaatttatatttgtgttattttttatatataaaataattttttaaaagtaatagtatatttatatttatatatatatatatatatatatatgtatataatattatattaaattattttttttaattataaaaatttatgtgtttgatgttttgaaaaatatattttatggtgttttttattttaatttattatattatgtttgggttttaataatgttgaaataatgtaaataatgttttttatgttttaaatagaatgaggtaatttttttgattttacgttatatattttttttttaaatatttaatttttaatttttataatagaattttttattttgggaatggatatagaaataggggaaatttaattagattttttaaatattttattttttttaagtttaataaaattaatagaagtttaatgttaagtaaagtttatttgtttattagtaaagatagatattgaaaattgtgggtggtgtaattaaaagaataatgataaaaatgttatataatattttttgaatattttttgtatattgagtttatgtattttttatgtttttggtaattgatttattaattttttatggggaatattgaaatttataaatgatcgaaattaattttgtttttagagggtagtagtattatattgaattaaatagatgagtataaatattttgaaaaaaagtgtttttatgtattttaaaatagtttattttgaataataataaaaaaagaatgagattttaatatttttatataaaatatttttaaagtataaaatataggataagtttttggagtatgattgttttaaaagaaattagttttaaattttttgtaattttaaaatgtgaattttttgaaatagaaaatatgtgtgtaataaaagttaaattagataattttattaattgtattttatttataatatattattattttaataattaattttgaattaatagtaagtattagttttattttagtaatgttaaaattttttgtaataaaatgattgaaatgatattgttaattttttatatgagttataaaattgtaagtagtttttataattttggaaggattaaagatatagttttttatatataagttggtatttttatgttgtttgatttatgtgatattaattatttttgaatacgtaaattttattttaattattaatattgtttttaatttttaaaaatattagttaaatttatataatattattttattattttgatttatttgataagttaattgattattttttttaattgaaataaattgagttgatagaattgatagaagagtatgttttttaggtttagaatttgttaatttagaataatatatgatagagaattattatgatacggggatagttttagtattaaatataattgttataaaatagttaattagtaagtaagaatgttgattaaatttttaattaaagttgagttttatgtatatatgtatttgtgtgtttttaaatttttttggagttatatttaattgataaaatataatgtttgtgtttattaatatgatttttaaaataattttaaattaataatagtgttattaaatttaataaatatttatagtatatatataaataattgtattaaagtgagttaagaaatattggtgaatattgataagtttaaatgttatttttttttttttttaaattttttatttaatattttatgttgatgaatatatttaaaatacgataatttgttttagaaggttttttaggtatatagagagtttttggtatttataaatatgagtattttatggtaaaattttttattttttttaaattagatatataagtattttttaatagaaatttataataaatataattgaggattgttaaaaatattttttaaaaatcgaaaaatgtatgaattaaaatgatttgttaaaatatattttttttattattgaagttataattgttagttttaaaaattattgaatttttttttttgagtggtatatttatgaataattgtaaatgttgtttatatttttttgtttttatttaaggattttagaatgttaagttgatattttgagtttttatgagaaattagaaaatttggtgtgaagattttaagtggtgtgtttgatttatagtaggtttatagtaagtattattaaattacgtatcgtgagtttttgaattttagatatgtttgttttgaaattaataaaaatgtgatttattagttttttaaatatgggattttagaatttatataataaagtaggaataaaaatattttggtatttttaattttatagttatatattattattttaaattgttgtagaaatttttatataatgtgatgttatttatttttaagttaatatgattttagaattttagagataagttattgaggtagtgttttagatagaaaatttgaataaagatttgtatttgtagaatatagggaattttatttaatatttgtattgttatgtatatttagaaaaattattttttataaattaataattttattagatattaattgatgatttttttattttttatttttaatatatttgatagtatttattattaagttaaattttttttttattttttgtattaaagatataattatttttagtttaatttgttattgagtaattttgttagtaggtggtggtagtgtattataaaggtaaaagttgataaattcgttgtagtagttgtatttagtaataatagttaatgttgtttattgagtaattataatatttttgatatttttgtaattgtattttttaatgattataattatttattgagttaggtattattatttttattttataaattataaaatagtttttagaaattaagtaaataatttaaatttatattataaatgatgggtttaaaattgatttttatatggttttataatagttattttatatatttttaataattatatgatattgttatagatatgtgattgagatttttaaagtagtatttggattaagtatacggttttaattatataatttttatttaattaataatatttttttttaaatatttatttttatgaaattaaaaatggttttaataatggaagtaggtgataattttatagaaattttttaggagaaatattaagtattaatttttatgaattatattttgttaattattaggtgattatttgtttttatttatattttaatgtattttttatagaaattttgtattagaatattttttgtgtagtgattttgtagtttatatttaagtatagtatttttggatttaagtaatggttaggtgtgttgtgtgatttatagtgttatgttattttatttaaaagggatggaaatttgtttcggtttttattttttattttgaataaatttttttgaatgttaataattgggtattgattatgcgttaagtattgtgttgttattatagatatgatagtaaattagatgatagtaatttttcgtttatggagtatatagatattaaggatttatataaatatttagaaagttttgggtgttgtgcgagtgaatagtaggatatttaaattagtttgaaggggttagcgataatttttttgagatttgaaattgagatttgaaggaaatgtttatagaggtaataattatttgttagcggttatgagaaagtaaaatatatagagggtaatttaaaaggaatttaatttgatttagttatataaatagaattatggtttatattgaattatttgtttttgatgttatgaattttatgttttatagtttaaaggttataattttgtttttttttttttttttttcgttttatgttttgggatgttggatagaagtttattataatatttgttgtttgaaaatatattatgtttttgattgtaagaatatttatttttttggaatttatttgtaaatttagggtttttaggtaatttattatttaagaatttatatgttgttagattttaattaaaggattttattttattttattttattttttggtagggaagaataaatatatgtattttttgttttttttgtgttagaaaatgtgttagatgtttttttattttttatataaaaattataggaaattagttatttatattatttatttatagtttaggatattggtagttagaaagtttaatttatttagttttataaaggtattaggtggtaaattatatttgtaaatttaggtttgtttgattttaaattttataaaagatatttgttttttattaaatgtttatttttaatttttttttttttagtttaatggaattgttttaaaaagtttattattattttttttattattatttttgttttatttagacgttaattttagattattttttttgttgatttgattgttaaaaaaattatttattatttgtttgtgagagaagtaataaaatttgatgtatttttttattaataagagtattttattttaattaaataatatatttttataaaatgatgttatgattttagtattatgtgataaattgtattttttaaatagaatttttttagatgtgagataaggttattataaaaattaattttaaataaaaataaaataaaattagataaaattgtaattagttggtgaagaggtttttaagtttagtttaaatattaaaattttttgttattatttaggtttggaagttattttatagtaattttaaattttggtttaattattgataatttaattttggattattgattgatagtggtagtagttataattttaggaattttttggttaattaatatttatttttttagtttagttgaggaaaattggattgggataaatatagggaatatttggatttatttgttttttattttttataagtgagattgtttgttttttttttgttaagatttattttattttttattttttttgtttttgtaatttttagaatgttagaattttaatttattattttttgagaaaaaagtcgaatgagggattgaaatttataatgtttaaatttttatttttaaaaaggtatattagggtttttattaaataatgttttatttttaggaaatttttataatatgatttttttttgtggagtttttagagagttaagtttgattgaattttttttttttttttattaatagtagtattttttatgtttttgttattttgtgtattattttatacggaaataaattgtttattttttatatttttttaggaaatagtgagatttttgagtattttattttagttatatttgtttttttagtattttttatagatttaggtttagaagatgtatttatttaaattttattaaagtatattgaatatagttattttaaaaagttattaaagttattaaataagaatgtatttatggaaattttttttatattttaaattattatataaaaataagttattattttgttaatatttttttattaatattaatgtttgagatttttgttaataatttattaatttgttataaaatgttattttaagaaaggtatatatttataataattattattatatagttttttttttgttttattttttattgttaatatttttatttttagatatagagttttatgggattagatttaatttatattattagattttttggtgttttggttgattagatttttatattagttttaattgggaagttttgattttggaaatatggggaagaaagagagaatagttgaaattttagatgtttgaagtttttttttttttttatattttttttagttaaagggtagtattaaatgttatagggagttgtttttataatattttgttttttgtaatagttcggagttattttagtgtttaatattgtatgttgaaaaaaaagagagaagtgttttagttaaagttatttggtttcggattgtttaaaatatatatgtgtatgtatatatatatatatatatatatatatatatatatatatatatattaggtataataaatttttaaagaaaaatattattttaataataattaatttttttttataatggaaaattatggtagattttttagattaaaattgagagttttaattagtttaaaaagataattgtttttaatattttatttgtgataattgtgtgttttttattttttttagaattagtattaagaggggtaggggtaagattaagtagtaggtatatagaagtttaaagtgtatgtattttttttattgtgtaaattatttttgaaatatagaatttatatatatttaataaataaagtgttaatatgtatttatttatagattagtaaatattatatgtgtattttatatgtaaatttttatgttattttatgtgtatatatatatatttttttgtgtatatttaatgagttatatttaaaatgtatatgtagtatttagaattatgggtaaatatatttagtgtatatatttattaatatttaagtaaataggttatattttaattttgaaaatataaataaaaaggatagtaattgagagatatgggtaaacgttgattaatatggcgaagtatgtattaaagtttatttttatgtgtaattttattttttatatttttcgtatagttatttttttttagttagaattaataattatttaggtatttttttattatttttttaatgtaatttttaatttttgatttatttttttttttgttttagttttttttttaaaaaggaaatatatttttagaatttttatttttgttttttttaaaaaatatattatttatattaattttttaattaggttttttgtgagatagtagatagttaaaatagaggataaaagaagtgtttgatattcgagttagtttttttttttagtttattatttcgtagtttagggagttatttgatttaaaaagttttatagaaaagtgattttaagtgataagttattatttttatattttaaaggaattagattttaataggagagtgagattttttttgttttaacgttgtttaaagatttatcgttaaaaaggaaaaaaaaaaaaaagaaaagaaagaagtaagttatttttatttttttaaagacgattttttttttggatttaaaggtggaaggaaaagtgtaatgattatgtaatatagaaaaataaaagaagagaatatttgttttttttttgtttttagttattagtgtttttttagttaggaaggaaagcgagattttattagtaaatatttataaatgtagggatagatattttattaaaaataatttagagaattatttggttttgtttgtagtagattatagttgtaatatatattattgtgggtagttatataataattaagtaataaatgttattatgttttaagttttattaaaattattagtgagatatataattttttttttttataatattttgtaagtgttaatatatatttgatttttagttagtagagattttatatattttgtaaattatattataaattatttgaatttataaatatatatatatatttatatagatatatgattttgaagaattttgaaattaaatttttaatttttatcgtatttttgaatacgttttttagagatttatttatttttatttgattttttgaaatatattattttgttatattttgagtataaaatatagagtgtattttgtattatatagtttaggaagtaggttgaggttgggggtttgttgaagtttttgagagagagggttttaaatttagtaagtttttgttttaaaaaatggtagtttagggtattgtttaaatttagtattttagattttcgttgggtgttaggattagaaattagttttgataaatttggattattagtttatttattttagaatatgtggaataatttgagatgataagggtaggtttgtattagtttttagaaatagttagagttggtgagttgagtattattaggtattttttattgtggttatattttttagatagttttatttttttttagtgtgatttaattttttttgtatagtatgatgtatgaataatgaattgttttgggttttaaattttaagagttttttaattaaaatagtgtgattatttttttttatggtttaggtttaaatagtttgagattagttttgatagttttagtatgaaataagggatattttttggattaatttatttgagttgggaattgtaggagattattatagatttggtggatttaaaattagtttggggttaggaataagaaaatgtaatagtatggtaaatattaatggaattatatggtttgggtggtggaaacggataagtgtaatttttagaaggaggaaattgttgtttttagaagggaagggtgttagatagataaatgattatatgattatatgattatatattatagtaagttatagttaaatagtagcgtatgtaattttttttttaaaaaaaagaaaagtaaaaggtaaataaagtatatgaattgtaggaggaattaaatatttaaatttttatttaaaaatgttgtttggttttgggtgataatagatttaatgtagggatgaatttatgtattaatttttatatattatgtaaaatttttttttttttggaaaaatttagtttttttaaaattagaaaatagagatttataaaatattatttgtagattttttttttttatagtttagtagagaatttgttgtaaatatttgtttgataagtttataattttggttttttaatagaaatatttttttttaaaaaaattgattttattatttaaaatagttttagatttaaaaaaaaatagagaagaatgtatagagattttttatatattttatatttagtttttttattaatatgttacgttagtatggtgtatttatcgttaatatattaaaattgatatattgttattaattaaagtttatatgttaattaaatatttttattttttttttagtacgtttttgttttagtaatttatttagaatattaaattgttttagttgttatttttttttaagtttttttggttgtgatagttttttagattttttttatttttgatgattttgatagttttgaataatattggttaggtattttgtagggtatttttttaatagaatttatttgatgtttttatttataattagattagggttatggggtttgggaaagaagataatagagttaaagtgttatttttgttatattatgataaggatatatattattaatataatttatgattgttgatattgattttaaatatttgattggggtaatgattgttagatttttttattatgaagttattttttatttttatttttttatattgtttatttatttatttttttatattttaagttttgggatatatgtgtagaatatgtaggtttgttatataggtatgtatatggtatgttggtttgttgtatttattaatttattatttatattaggtattttttttaatgttattttttttttagttttttattttttgatagatttcggtatgtgatgtttttttttttgtgtttatgtgttattattgtttaatttttatttatgagtgagaatatgtggtgtttggttttttgtttttgtgttagtttgttgagaatgatggtttttagttttatttatgtttttgtaaaggatatgaatatatttttttttatgtttgtatagtattttatggtgtatatgtgttatattttttttatatagtttattattgataggtatttgggtgggttttaagttttttttattgtgaatagtgtcgtgataaacgtgtgaaagcgtttttatgtagaatgatttatattgggttaaacggtatttttggttttagatttttgaggaattgttatattattttttataatggttgaattaatttatatttttaataatagtataaaagagtttttatttttttagtatttgttattttttgattttttaatgattattattttaattgattagtgatgatgggtttttttttatatgtttgttggttgagtaaatgtttttttttgagaagtgtttgttaatatttttcgtttattttttgatgggattgttttttttttgtatatttgtttaagttttttgtagattttagatattagttttttgttagatggatatattgtaaaaatttttttttattttgtaggttgtttgtttattttgatgattgttttttttgttttgtagaaattttttagtttaattagattttatttgttaattttggtttttgttgttattgtttttggtgttttagttatgaagtttttgtttatatttatgttttgaatggtattgtttgggtttttttttagggtttttatggttttaggttttatgtttaagtttttaatttattttgagttaatttttgtattaggtgtaaagaagaggtttagtttttgttttttgtatatggttagttagtttttttaatatgatttattaaataggaaattttttttttattgtttatatttgttaggtttgttaaagattagatgattttagatgtgtgttgttatttttgaggtttttgttttgttttattggtttatatatttgttttgttatttgtattatgttgttttggttattgtagttttatagtatagttggaagttaggtagcgtgatgtttttagttttgttttttttgtttaggattgttttggttatatgggttgttttttggttttatgtgaagtttaaagtagtttgttttttttaattttgtgaagaaagttaatggtagtttaattgggatagtattgaatttataaattgggtagtatggttattttttaatattgattttttttatttatgagtatgaaatgtttttttatttgtttgtgtttttttttatttttttgagtagttgtttttagatttttttgaagaggttttttatattttttgtgagttttatttttaggtattttattttttttgtcgtaattgtgaatgggagtttatttatgattttgttttttgtttgtttgttattggtgtataggaatgtttgtgatttttgtattttgagattttgttgaagttgtttattagtttaaggagatttggggttgagaagattggttttttaaatataaaattatgttatttgtaaatagagataatttgattttttttttttt

SEQ ID NO: 2215 - DNA, 14429 bp, Artificial Sequence
  chemically treated genomic DNA (Homo sapiens)
gggaagttcgtattcggggttttagaaaacggagaaaggttcggaaattttttacggttttagacgtcggcggggatagggtgttttttattttttgaggattttaaagaaagtaaattttaggttagtagcggcggagtttatagtggtttgggggcggggcggtgaggttgtttttttttgggttttattcggcgcggcgcgaggtttgtcgttttgagtcgttttagagaagtcggggtcggcggggtcgtttttttttattcgttaaattttggtttttaaggttttcgaattggtttttacggaggtagttaagttgtagcgaagtttttcgtttaagtcgagtaaattttttattttcgcggtcgtttgacgttattttttggaaatcgattggtttagacgcgtttttgttaatagtttcgtttttttattttaatttttaaagggtacgtagtatggtttttggattttgtgtgttattttttaaattatcgaattttttttaaatttgttttgtttgatatttggaagtaattttcggttattaaaattcgttaacgttgtttttgcgagacggtaaaataatttggtcgttaggaattgtttgtatttgtagttttgtttaaatatattaatatattaagtgtaaagtattattattgttatattgatgttttttatttgtatagttttttgtaaggtatagaaggtcgttatagttattggtttaacgtgaggggtattaataattttgtgtgggaagtaagataagtggtattgtttttatttgatagatgagaaaatagggaattaggtgtaataaatggtttattatgaattatggaaattgtaatatatataatttttgtttttaagaagtttatagagaggttgaattaatatattaaatagttgagtagtaataatttttaaaagtataaatatttaatattttattaaattttaataatttcgtaaagtgagtagtagtagtatttttaatataataataaagtatattgaggtataaagaaggggtttgaggaaaattatttaagtgttaagtagtagagttaaatgtttttttgatattagatattattggagtatttatttttagtatatattattgggtgttagttatttttttaggttggtagagggagatgtattataaatttttagtttaatggggtatttaagttgcgtttttgttgattttttatatgagatttttaagttaatattattggttaggtttttgatattggttggttgagatttataggagatgggttgatagttttgaaagtaaataatattttagtattatgttgaggggaaggtttggatggatataggttaaaagtaaggattcggaagtgggagtagtatttttgaaattttattgtaagtattttttaaatatttagtaaattatttagtttagttatatatgttattggataggattgtgtgttagtatgtttgtgatagtaagagtattggtttggatattagaagagttgtgtttttattttagtttttttgaaaattatttgtgtagttagagtagagtttttttcgttattagtttttttttttgtaattattttagagattatttttaagattttttgttaatttgttttttagtgagaatattttgttagattttaatttgaagaaatatttattgttaaaaatttaagatagatgaaatataggttttaatgaattttttgtttttttttttttcggtattagatgaggaagaagggattaatttttggatttttttattttttgtaagtttatagtatacgattattattttatagttagtttttagatttttatttttattttttttttaatttgttgaaaatagaaggtaaatggtttttattttgggtagagaggtattttgtagtagtagtttttagaatttgtttagtatttgaattacgtgtgaggtttgtaaagaaatagagatgttagggttttagttttggagattgatttggtagaggtggagtttaaaaaagtataattttaataatttttttttttattttgtaattgtttgtttaaaggtttttttttattattttatttgaaattgtaatattttttaatttaggtatattttattttttttttttgtttgattttttgttatattatatttgtttgtttgtttgtttgtttgagatacggttttgttttgtcgtttaggttggagtgtagtggtgtaattttggttttttgtaaattttgtttttttggtttaagtgattattttgttttagttttttaagtagatgtttgcgttaatatgtcgggttaatttttttatttttttgtagagattgggtttcgtcgtgttgttggggttggtttcgaatttttgagtttaagtaatttttttgtatgggtttttttaaatgttgggattataggcgtgagttattgtatttggtttagtattttttatcgtattatattatttatatatttatttagtttatcgttttttttattgttttatttttgtttttaaaataaaatttttttgagggtaggagttttgtttcgtttattgatattttttatagagtttagaatagtgtttggtatatagtaaatattaaattttttttgaaattttagaggtagtatagtatagtaattaagtttagaatttggtaacgttttgggtttaaattttaatagttgatatttaataattatgtgattttgggtaagttatttttaaagtttttatttttaggttttttattggttttgtaaatgaaagtaatgtttatttaagttagatagtttgtgtaaaatatcgtttttattatttataagtagtgtggtttgtaaaaaaaaaaataaaaaattttatgttttagtttttttattcgtaaagtgatttatcgttgtgttgggatatagagaatagtttttttagttagtggtttggaagttagattttttagaaagggtttaggaaggttggagtgagatggggtgggagcggtatttatttttaggaaagtttagtttagaggtaagttttgtgttgcggggtgcggggagttacgtgttttatttttttttggttgttcgtgggaaaaggtttagaggttcgggtcgagaagaggagcgaaagtatagagtcgatttttttttatttatttgggaaatgggttcgggttaattgttgatttcgcgttcgttggcgtagttttttgcggagatttcggcggggagggaggttgaatatttggatgatatttttgcgagagcggtttcggagcggcggtcggggagggagaggtgcgttcgtgcgtacgtcgggtcgggagggaggcgatttttcggggtttgggttttgtttttttcgttttttatcgtagttttttttttcgttttttagtttttatttcgtagtttttagttttcgagttttttcggttttcgattagtcgagtttttttattggcggtttcgtttcgttagagggtattttcgatttttcggaaaacgttattattttttattgtttttggagcgtttttaggtttttgttcgtttttcgatttcgattttgttaatgaagaatcgggttaggatcgtcgcggagcggacgtcgatttttcgattcggttcgtaggttgggagttttttttgcgaggttggtatggtcgtttttatcgggtttcgcgttttttgcggattttgtttcgggttgggtttggttcgcgggcggtttcgggatcgggggattaggagggagagtagacgcgggtcgcggacggcgcggattgatagttggcgagagggcgtcggggttgggggaaagggagggagggggtttatcggagtaattttttagaaaaatagttaacgtgtggtaggagtgattttaagaggggaaaaaaagtttagttattacgtcgaacgagaggattcgtaaagtattttttaaaagggttcggttttttttgtgtttgtttaaaatattaatatcgtgtagtaaaagaggttgcgtgcgttggttttttttttttttattttaggttagagacgttatgggagggaggtataaaattttagtagagagaaatagagaaagtagtgtgtgtgtatgtgtgtgtgtgtgagagagagagggagaggagcgagagggagagggagagggagagagagaaagggagggaagtagagagttaagtttaagggaatgagcgagagaggtagagataggggaagaggcgtgcgagagaaggaataatagtttttcggagtaggcgtgtcgtgaattggtttttattttattttattttttttttttttttattttttaaagagaagtaggggatagaagtaatggtcgaggtagaagataagtcgaggtgttggtgattttgggcgtttgagtggatgattggggttgttgcgtttagaggtttgtttttttgttttttaatgtatataattttatattttagttaatgaagacgagaggtagcgtgaataaagttatttagaaagttttcgaggaagtgtaaataaaagagaaagtatgaatggagtgtttgagagataagtgtgttttgtattgtttttatttttagttgggttagtaattgttcggttttgtttttttttatttatttattggtgatttttttttttttatttttttttttttttttttttttattttttttttttatttttttttaaggtaaggtaaggattttgattttgggatttagttatggtttttttgttttttttttaaaatatttattttttttttatcgttaagcggcgtttggtaatattagatatttattttatttatttttatttaaggaaaaattttagttttttttttatttttagttgttttgttattttttttagttttttgtttgttttttatttggtttgttgggagttagagtttagtaaaatttgtttagatatatggataagaattttagcgttataaggtatatagttcgttttttcgtttttagggttgttagcgttttttggaagttttgaagttttcgtagtgtagtgagtttatgtatttttttgttaagttttagtttttgggatttggggaggtcgtttggtttttttttttttttttgtacgtttgttggggtttttttttttttaggttttgtcgtttttttggtttttttttttagtttatatatgaagatgtatttgtaaagggttttggtggttttggttttgttgaattttgttacggttagtttttttttgtttatttgtattattttggatttcggttatattaagaagaagagggtggaagttattaggggatagattttgagtaagtttaggtttattagtttttttgagttaacggtgatgatttacgttttttattaggttttggttttttataatagtattcgggagttgttggaggagatgtatggggagagggaggaaggttgtatttaggaaaatatcgagtcggaatattatgttaaagaaatttataaattcgatatgatttaggggttggcggagtatagtaagtttaaattttcgttggggtgtttgttttggagggtttgaattggagttgggagttttgtagaggggggtttagtgttggttatatagtagggtgttttaggatttattagtattaaggtttaggatgtgcgatgttttttcgttggggttggggaggtgggtggggaaggagatagagttattttgttaagagtcggcgtttttgggaggttaggagttttggagttgagtggtttgttgaatttatattatatttttgattgattttaatttggaattatattgtgttgtttagggaaatatatgtatttttgtatatgcgatcgtattagtaattgtaagtatttgggtgttataaaggggaaggtcggttttgttaggagtttttacggtttttagtgtggagattttattttttttttgttttttataatttattgtgatacgttttcgttttagtttttttagtttttgggaagaagaatatttgttttaaattaatgtttgttaagttttttgaagtttaggtaggagatagttttttgttgtttgggttttttggtttattttatttacgtgatttacgagatttacgtgagttgtgtgtgtggaaggaagagggtatgtacgaatgtttttagggtcgtgtattttagggtgatatgtagttttgtgtagtagatagatttatgtgtttaaaatgggcgttttttaggtcggtgggtacggggagagcgggttttggttgtggatgcgtagaggaggttggcgttttttgtgtttgcgtgttacgggagagcgggtggaggggtggtagtgggtgtatggtgggggggggggatatgtttgggagtttgtcgttttaggaggttttgtttgtatggaggagtcgggcggtttttgggcgagatgtttgtgtgtgttggtatacgtgtggaagttatatgtgtttattgaaggggattttaaaaattttaatataagagagagaaatttggtagatgttgagaaattgatagtttaggaaagaggaatgtgagttattcgtgggtcgtagatttcgggagtagttttgtttgttttttttattagtaggtgttttcgtcgttttgattattttagtttaggtttatttgggaggtgggtagtttttggagtggggtggagggtatgggatggagttggtaggtaggggagggtggttagtagagtatatagtaaggggtgaaaggaatttggttggagagaaggaataggagtgggtatcgatgggtggattagttttggttggaggtgtaaaggtttcgtttacggttttacgttaggtagaggagtttgtggttattggcgaggggttttcgttttagttttttgtggttgtttggagcgtttttttttaggatgtggttgttatgtggggcggaggttggaggtcgatgtagagttattattttttgtttagggtttttgggtggggttggtttagagatttatagtttttagaggtatttagtagttcgatggttaaggttttaattttttgggaatttattaacgcgggagatagtgattataagtattagaggaaggtcgaaatttgaggtcggtaggagaggtgtgaggagagtttagggtaagagggtaggatttagatttttatggtttgggttagtaggaggagtttaagggaggaagtattttgagttattaggatttttttatttcggaattttgagttgagaatgaatgagttacgtggaggtaaggttatgtaggtgtaagtggatattgattttgtgtagatttaaagtataaatagtagatgtttttgggaaaagttcgggtagggttttatagatgttgggtagtttttaggttgtagtattaagattttataattgtaatagatgggtggatgtggggttatggagtaatggtttggtttggggtaatttagtatagtgagtaggatgttgtttaggatgttggggaggagttaacgtgcgatgttatgaggtttataggtataaatcggaagtaggtagattttgtagttgttggaggtgatttggaggttgagtagacggatttgggttcgttttgtagttggtcgggtgttgagtttattttagagaggtagatatataaggtatattaattataaagaaggtagtgggtaggtgttgagtaggagtagagagttattattaggggtttgtaaggcggcggggcggggtgggggaaggaagtttgtttttaatttatgagggtagataggggtgatattaggtttgtggtggggtatagtagggttttaatgttagagtttttgttgggaggttatgagattacgttttgttttatatttttttatttttggttatttttttgatttagtgaatatgtatttaaaggaaagtgatagtaggagttagggtaaggagatagaggtttttggagaggaaaatgaaagaggaaatattttttagtagtgtaggagaaagggtattaaggtgagagtagagaggaaggtttttttttaaataattttttttttttgttttatagataaggaaattgagatttggattgtttaagtaatttgtttaaaaagagtagggattttaatttagatattttgtgtgtaggacgtatgtagttaagtatttatttatatgtaaaatatacgttgtaagtgttatttttaattttttttaatttttagggtttagtagaattttgatttataatataaatgaattatgtgttggattaagtaggagaggttagagttattattttagtaatttaggtggtagattgtataatgataattggatttgtttttttttagttttgtatttttttttttttttttttgttcgggagatttatattgttataaatgttttttttaatttaatgaaggagttttttttatttaatgaagagttttaagtaggttaagtaatcgtagttacgtaaaagtgatttttttgagttttagtttttttagttgtaaagttagagatgatttttaaatttttttttagttgaaagaattttataattttatttgggatgaattagtagagtttttattggggagtatgggtaagattttgtaattttttttttaattttttaggattttattgtcgggagggagtagagagtttttttgattttatgtgatgggaaaggatatagtttttttattttcgttgttattttttttataaaggtattattaatgtaggtgttattttattttttggtttgtaattatttgtttttgttcggagatttgttgtttttagttaagggtagcgttaagataattagtaaatttagagttttttagtaaagagaaaattttatattttagtttttgttttttagttgttaagtgtagattttgtttattttgagaattattttgaaaattatttgttttaagggttaatgttttttgtatagtagaggttagtatttttttaagtgtggtttagaggaagttggaggtaaatgtagattttttggttttatttatttttatagaattagaattttgagggggtggagttttggggaatttgtattttcgataagttttttatggatttttaagtatattgaagtttaagagttagtgaattagggcgaaattttttttagagggatggtaaatataagtgtttatagagattcggtaggaaatgtaaatgatttggaagaaaagttacggcgttatgataaattgtattaggatatttggttttggggttaagaagaaagtagggtgtgtgagatagggagagggaggggatttggagtttacgtgtttagttaaagtagtagttagttttagtttttgttgggttttgtattgaggattgtgggtttagtttgattagtttttttcgtgttttagaaaagtagaaaatttggatttttttgtgaagtgttttaatttttaatatgggtttaaaatgtttatgggtttttaatttaaaatttttaaaggtgttttattagcgaaataatatgtttaatttatttaacggttaattaatagaaagtttatattattaaagtagtggttttttaaatttttagaatatttagaagttatggtgttttttgtaatatattataatttgtggtttttaattttggttgtacgttagaattatttggagattttgaaaaaaatatgtcgtggattttatttattttagtgtagttagaattgttggggaatgggtttaggaattatttgtttttaaagttttttaggtgattttaatgtgtagttagggtagagaagtatagttatattgataaatatagtttttttattagaattagtagaaatgatatatataagtaaaggtatatttagttatttaggtgtttgaatatattttaaaaggtagttaattaaatatggttagttattttttggtttttttatgtatattgtatatgaatattttttgtttatgttttgtttcgttaaataaaatagagaaaatggtatttattaatatatattttttttgtgtaatggaaaaagttgtttaagatttaatttgtaaaggtgggattttttagtttagtttttaataatattagtgttttgtgaggtatggtttaagaattataaattcgtttgtagtgggttattgtttgaggtataggttgatattttaggtttatttagtggaattttgttatattttgttgatgaaattatttttattagatgattttttagattttttttagtttgaagagtttttgttttaataaatgaggtatgtttagaagatttgggtttaaattttatttttattattttttagttatgtgattttgggaaagatatttaattttttgaggtttagtttttttatttgttaagtgataaattttatatgtttttattttttttaggggttgttagaaggttatatgaagtaataaaaattcgataaaataaggtggtgttattatattttgtttatttatgtatacgatgatttattttatagattatttaaaatattattatttagtgaatttgattgttaagaagattgtatgtatattttttttgattttttaggtaatttttttttttaattaattttaattttaatttttttgatagagttttattttgttatttagtttggagtgtattggtgtaatttcggtttattgtagtttttgttttttgggtttaagtgatttttatgttttagtttttcgagtagttggggttataggtgtttattattatatttagttaatttttgtatttggagtagagatggggttttgttatgttggttaggttggtttcgaatttttgatttttagtgatttatttgtttcggttttttaaagtgttgggattataggtatgagttattgttttcggtttttaaaatttttaattttaaataatagggataggttttttttatgttgtttaggttgattttgaatttttgggtttaagtaattttttcgttttagtttttcgagtagttgaaataatagatatgtgttattatgtttagttaattttcgtattttttatagagatggggttttattatgttggttaggttggttttaaatatttgagtttaagtaatttatttattttagttttttaaggtgttggttgggattataggcgtgagttattatgtttggttgttaatttttttttttttttttttttttttttttttttttgagatggagttttattttgttgtttaggttggagtgtagtgatataattttagtttattgtaatttcgattttttaggtttaagtgatttttttgttttagttttttgaatagttaggattataagtatgtattattatgtttggttaatttttgtatttttagtagagacggggttttattttgttgtttaggtgttaatttttttttaattattagtaattgtgttttaagttttgtttgttagtgttaagttgtttgtgttagttaatttttgagtgattttggttaagattttttagatagttatttttttttttgaagagggttgcgttatatgatttttgatgttttttttaattatgggaaatttatatattttagtaatagaaaaatgattttttttattttttttttgaaattttaaaattttttttaggatgtgtttattttggggagtagattatgattgataggttggaagaaattaaagaggacggttattagggtgttttgagaatttttttagtttataattttttttattttttggttttttattgttttgatttattttgattgttttattagtaagtgttattttttatttttttttttttttttttgagatggagttttattttgttgtttaggttggagtgtaatggtattattttagtttattgtaatttttgttttttgggtttaagcgatttttttgttttaatttttttagtagttgggattataggtacgtattattaggtttggttaatttttatatttttagtagagatagggttttattatgttggttaggttggttttaaatttttgatgtcgtgatttgtttatttcggtttttcgaagtgttgggattataggcgtgagttatcgtgttcggttttattttttttttttttatagtaaggtgtatgttgtattgatttattttttattttttttgtagttattggagttgtgttatttatttattttattaatttatttatttatttgaaatagagtttttttttgttgtttaggttggagtgtagtggtataattttggtttattgtaatttggatttttcgagtttaagtgatttttttagtaggtgttattgtaattgaagttatattaataatagtttttttaaaatttagttttgttgtttttgatagggttgttaatgtaagtagtttatttatatttagagtattataaatttgtaaatttatatattatttaattattattgatttttttttttggttttatttgaaatggtttagggaatcgttggtagtatttgtttttttaaagttaattattaattagggttttattagatagtatttatatatttgtttttttaatatttgttttattaattttttaagaattagcgttaggtttattagatggtaatttttagaaatatttatttatttttttttgaagattagtagcgtatttgtttgtttttaggtttttgattttttttgttttgtttgtgatttttttaataatttttcggggtgattataagtttattttagttatgtttattatgtgtggaatttgggtttatgagtttgaattttaatttcgggttattgttattatttgtgtagaaagtttttttttgggtgttaatattgtttagattttgaggttgttaagtgtataggagtagagaaaagataggttttttttttttttttggtttagaggggtgggaaagagtattcgttgtttatattttgtggatagggatgaagaggttagtaggtgatagcgtttggtatagtacgtgttgttaaggaaagagaaaggagttaatggtgatatattagtttggttagaggaagtatttgtgtttttgttaggtttatgatgtgggttttttgttatataagttttgttttattgggtttaaaatataaggttgagatgttattgtattgtttaaatatttttagtgattttttattgttaatgggttaaaatttaattttttagtttgataggtggattttaatttattattttgtttttttttatttggtttttatttgttgtttcgggttttttttatttatttgtatttttttttttttttgtttttgtttttagtagttattttatgtaatattttttttttttttatttttaaatttttttaatttttatttttttcgtgaagtgttttttgttattttttttttttgattttttgtagtaatttttggatttttttgaaaattattggttttttgtcgttttttttatttgtgtttttgtattgtgatatttttcggggtattttgttttattatttttttttagttttgttatttgggtttatgtattaatatttttttttagatattaatttataagtttgaggttgtatttttttgaattttgaaattagattttggttttgattttgagtagtaggatataaataatttttatatgtttagcgttttaataatggaatattaggtataaatgggttttaatttttttgaaggtaggggttgtgtttatttatgttttgttttttaaggttagtattatgtttggtatatagtagttgtttaatatatttttgataaatgaatgaatgtttagatgaataaatatacgaataaattaattagttgtaagatatgtaaattattaggtgttgatatttttttagaattagtatttttttaaaaagtaggaaaaacgggttggaaaatttattagaattgagatgttaaggtagtgggaggagggggtaattagatttgattggttagtttagtgttatgttgtggagttttgaggttatattgttttttgtttaggattgtgtgtgattttagggttattaagaatttttttcgtatttttattttgcggtttgaggttttaagtttttagggaggtggtaggcgggacggtggttatttggtgtttgttcgttggtagtatattgtttttgtatgtttcgtttatgttgtgttttttgttttgttttattttttaga

SEQ ID NO: 2216 - DNA, 14429 bp, Artificial Sequence
  chemically treated genomic DNA (Homo sapiens)
tttaggagataaagtagagtagagggtatagtatgagcgagatatgtaggaatagtgtgttgttaacggataggtattaagtggttatcgtttcgtttgttatttttttagaggtttgaggttttagatcgtaaggtggagatacgaggaagatttttggtggttttagaattatatatagttttgagtaaggagtagtgtggttttagagttttataatatggtattagattggttagttaaatttaattgttttttttttttattgttttgatattttagttttggtaagttttttaattcgttttttttattttttgagaaaatattgattttagaaagatattagtatttagtagtttatatattttatagttagttgatttattcgtgtgtttgtttatttgggtatttatttatttattaaagatgtattgagtagttattatatgttaagtatagtgttaattttgggaagtaaaatatgagtagatataatttttgtttttaaggggattaaaatttatttatgtttggtgttttattattggaacgttaagtatgtaagagttatttatattttgttgtttaaggttaaggttaaggtttgattttaaaatttaaaaaagtgtagttttaggtttatgggttaatatttaagggggggtattaatatatgggtttaaataataggattagagagaaataataggatagagtgtttcggaagatgttataatgtaggagtataggtgaggggagcgataggaaattagtggtttttagagaagtttaggagttgttgtaggaaattaaaggagggaaatggtaaggagtattttacggaaggggtgaaaattgagaggatttgaggatggggaggaaagaaatgttatatggagtgattgttggaagtaaaggtagggaggggaggaaatgtaaatgagtaagaggggttcgaaatagtaggtgggagttaggtgagaaagggtaagatgatagattggggtttatttgttagattaaaaggttaaattttaatttattaatagtagggagttattgaaagtgtttgagtagtgtagtgatattttaattttgtgttttagatttaataaagtagggtttatatagtaaagagtttatattatgagtttggtagaaatatagatgttttttttgattaagttggtgtgttattattggtttttttttttttttttgatagtacgtgttatgttagacgttgttatttgttggtttttttatttttgtttataagatgtgggtagcgaatgtttttttttatttttttgagttagagaaagagaaagagtttgttttttttttgtttttgtatatttgatagttttaaggtttgagtagtattaatatttagagaaaaattttttgtataaatggtaataatagttcgaagttgaaatttaagtttatagatttagattttatatataatggatatggttggaatgagtttataattatttcgaggggttgttgaggaagttatagataaggtaggaaggattagaggtttggaaataagtaaatgcgttattgatttttaggaaaggatgagtgagtgtttttggaaattgttatttggtgggtttgacgttggtttttagaaaattaatggaatagatgttaggaaaataaatgtgtgaatgttgtttaatgaagttttgattaataattggttttgaaagaatagatattgttaacgattttttaaattattttagatagaattaaggagagaaattagtgatagttaagtaatgtgtaagtttataagtttgtaatattttgaatgtggataagttatttgtattggtaattttattaaggataatagagttgggttttgaaggagttgttattgatatggttttagttataatagtatttgttgggaggattatttgagttcgggaggtttagattgtagtgagttaggattgtgttattgtattttagtttgggtaatagagggagattttgttttaagtaaataaataaattaataaagtaaataaataatatagttttagtgattataagaggaataaagggtaagttagtgtaatatgtattttgttgtaaaaagaagggagatggggtcgggtacggtggtttacgtttgtaattttagtatttcgggaagtcgaggtgggtagattacgatattaggagtttgagattagtttgattaatatggtgaaattttgtttttattaaaaatatgaaaattagttaggtttggtggtgcgtgtttgtaattttagttattgaggaggttgaggtaggagaatcgtttgaatttaggaggtagaggttgtaatgagttgaggtggtgttattgtattttaatttgggtaatagagtgagattttattttagaaaaaaaagaagggagatggaaaatggtatttgttggtgagatagttagagtgggttaaggtagtgggaagttaggagatggggaaagttatgagttaagagagtttttaggatattttagtggtcgttttttttggttttttttagtttattaattataatttgttttttaggatgaatatattttggggagaattttaaggttttaagaaagaggtgggaaaggttatttttttattattgggatatatagattttttatgattagaagggatattaggagttatgtggcgtaattttttttagaggaagaaatggttgtttagagggttttggttagagttatttagaagttagttgatataagtaatttgatattagtaagtaaagtttaggatataattgttagtgattaaaaaagaattggtatttgggtaataaggtgaaatttcgtttttattaaaaatataaaaattagttaggtatgatggtgtatgtttgtaattttagttatttaggaggttgaggtaggagagttatttgaatttgggaggtcgaggttgtagtgagttgagattgtgttattgtattttagtttgggtaatagagtgagattttattttaaaaaaaaaaaaaaaaagaagaagaagaagaagaattggtagttaggtatggtggtttacgtttgtaattttagttagtattttgggaggttgaggtgggtggattgtttgagtttaggtgtttgagattagtttggttaatatggtgaaattttatttttataaaaaatacgaaaattagttgggtatggtagtatatgtttgttattttagttattcgggaggttgaggcgggaggattgtttgagtttaggagtttaagattagtttggataatatagggaggatttatttttattatttaaaattaaaaattttaaaggtcgagaatagtggtttatgtttgtaattttagtattttgggaggtcgaggtaggtggattattggaggttaggagttcgagattagtttggttaatatggtaaaattttatttttattttaaatataaaaattagttgggtgtggtggtgggtatttgtaattttagttattcgggaggttgaggtatgagaattatttgaatttagaaggtagaagttatagtgagtcgagattgtattagtgtattttaggttgggtgatagagtgagattttgttaaaaaaattaaaattaaaattaattaaaaaaaagaattgtttgggagattaaagaaaatgtatatataatttttttgataattaaatttattgaataatgatgttttaagtaatttgtggaatgaattatcgtatatataaataagtaaaatgtaatagtattattttgttttgtcgagtttttattattttatgtgattttttaataatttttgagaagaatgaaaatatgtaaaatttattatttgataaatgagaaaattgagttttaaaaagttaaatgttttttttaaggttatataattagaaggtggtggaggtggggtttgaatttaggttttttgaatatattttatttattgaagtagagattttttaagttgggagggatttgggagattatttggtgaagatggttttattaataaaatatggtaagattttattaaatgggtttagagtgttaatttatgttttagataatgatttattgtaaacgagtttgtggtttttaagttatgttttatagaatattagtattattgagagttggattagggggttttatttttataaattaaattttgagtaattttttttattgtatagaaaaaatatatattggtgaatgttattttttttattttgtttaacggggtaaaatataagtaaagaatatttatgtatagtatgtatggaaaaattaggaaatagttgattatgtttagttaattgttttttaaaatgtgtttagatatttgggtggttaggtgtgtttttgtttgtatatattatttttgttggttttagtgaagggattatatttattagtgtggttgtatttttttattttggttgtatattagaattatttggaaagttttaaaaataaatgatttttggatttattttttagtagttttgattatattggagtgagtggggtttacggtatattttttttaagatttttagatgattttaacgtgtagttagggttgagaattatagattataatgtgttgtaaagggtattatggtttttagatgttttggaagtttgagaaattattgttttaatggtgtgagttttttattgattaatcgttaaatgaattagatatgttgtttcgttgatggaatatttttaaaaattttgagttagaagtttataaatattttaagtttatgttaaaaattggaatattttatagaaagatttagattttttgtttttttgggatacgggaagaattaattaagttggatttatagtttttaatgtaaaatttagtaagaattgaggttggttgttgttttggttgggtacgtgggttttaggttttttttttttttttgttttatatattttattttttttttgattttaagattaagtgttttggtgtagtttattatgacgtcgtggttttttttttagattatttgtattttttgtcgggtttttgtaggtatttgtgtttgttatttttttaagaaaagtttcgttttagtttattgatttttaagttttaatgtgtttaagaatttataaggagtttgtcgaaaatataggttttttaagattttatttttttaagattttgattttataagggtgggtgggattagggaatttatatttatttttagttttttttggattatatttggagaagtgttgatttttattgtgtagagggtattggtttttggagtaaatgatttttagaataatttttagaataaataaaatttatatttagtagttagagaataaagattaaaatatagagttttttttttgttgagaaattttgggtttgttggttgttttagcgttgtttttggttgaaaataataagttttcgaatagagatagataattataagttagaagataaaatgatatttatattggtgatatttttgtaagagggatgataacggaagtaaaaaagttgtgtttttttttattatatggggttagagaaattttttattttttttcgatagtaaaattttggagaattagaaaaaggattatagagttttgtttatattttttaatagaggttttgttgatttattttagatggaattataaaatttttttagttgaaaaggagtttggaaattatttttaattttatagttggggaaattgaggtttagagaggttatttttacgtagttgcggttgtttaatttgtttgagattttttattaaataaagaaaatttttttattaaattagggagaatatttgtggtagtatgaatttttcgggtaaaaaaaaaaaaaaaaaaatgtagagttaaggaagaataaatttagttattattgtgtaatttgttatttgggttattaagataataattttgattttttttgtttggtttaatatatgatttatttatgttataaattaaagttttattgaattttaaaggttaaaggaggttaaaggtaatatttataacgtgtattttatatataaatgagtgtttaattatatgcgttttgtatatagaatgtttaggttagggtttttgttttttttggataaattatttaagtaatttaggttttagtttttttatttgtaaaatagggagaaaaggttatttaggaaaaggtttttttttttgtttttattttggtgtttttttttttgtattattaaaaagtatttttttttttatttttttttttagggatttttatttttttgttttggtttttattgttatttttttttgaatgtatgtttattgggttagggaagtggttagaagtgaggaaatatggaatagaacgtgattttatgattttttagtagaggttttggtattgagattttgttgtgttttattatagatttggtgttatttttgtttgtttttatgagttaaagataggttttttttttttatttcgtttcgtcgttttgtaagtttttgatgatggttttttgtttttgtttagtatttgtttattgttttttttatagttagtgtgttttgtgtgtttgtttttttggggtgggtttagtattcgattagttgtagggcgggtttaggttcgtttgtttagtttttaagttatttttaatagttgtagagtttgtttgttttcggtttgtatttgtgagttttatagtatcgtacgttggtttttttttagtattttgaatagtattttgtttattgtgttgggttgttttaggttagattattgttttataattttatatttatttatttgttgtagttgtaaggttttggtattgtagtttggaagttgtttagtatttatggggttttgttcgggttttttttaaggatatttgttatttgtgttttgagtttgtataaaattagtgtttatttgtatttgtatggttttgtttttacgtggtttatttatttttagtttaggatttcgggatgggggggttttggtgatttagaatgtttttttttttggattttttttgttgatttagattatgaaggtttgagttttgtttttttgttttggattttttttatattttttttgtcggttttagatttcgatttttttttgatgtttgtggttattatttttcgcgttggtgggtttttagggagttggagttttggttatcgagttgttaggtgtttttgggaattgtgggtttttgagttagttttatttagagattttgggtagggagtagtagttttgtatcggtttttagttttcgttttatatggtagttatattttgaagaaaggcgttttaggtagttataggaagttggagcgggaatttttcgttagtaattataggtttttttgtttggcgtggagtcgtgaacggggtttttgtatttttagttagagttggtttatttatcggtatttatttttgttttttttttttagttaggttttttttattttttgttgtgtgttttgttgattatttttttttgtttgttagttttattttatgttttttattttattttaggagttgtttattttttaggtgggtttgggttgaggtagttagggcggcgaggatatttgttggtaggaaaagtaaatagagttgttttcggagtttacggtttacgagtggtttatattttttttttttgggttgttagttttttaatatttgttaaattttttttttttgtattgaggtttttaaaattttttttagtaaatatatatgatttttatacgtgtattaatatatatagatatttcgtttagaagtcgttcggtttttttatgtagatagagttttttgggacggtaggtttttagatatattttttttttttattatgtatttattgttatttttttattcgttttttcgtgatacgtagatataaagggcgttagttttttttacgtatttatagttaaaattcgtttttttcgtgtttatcggtttggagggcgtttattttgagtatatgaatttgtttattgtataagattgtatgttattttaaagtatacggttttgggaatattcgtgtatatttttttttttttatatatatagtttacgtgggtttcgtgggttacgtgggtggggtagattaaagggtttaggtagtaagaagttgttttttgtttgggttttaaaaagtttgatagatattaatttggggtaggtatttttttttttaagaattggaaaaattgaaacggagacgtgttataatgagttgtgaaaagtagggagaagatgaggtttttatattgagaatcgtaagggtttttgatagagtcggtttttttttttatggtatttagatgtttatagttattgatacgatcgtatgtgtaagaatatatatgtttttttggatagtataatgtaattttaaattaaaattagttaaggatgtgatgtgaatttagtaagttatttagttttagggtttttggttttttagaagcgtcggtttttaatagaatggttttatttttttttttatttatttttttagttttaacggaggagtatcgtatattttgagttttggtgttggtgaattttggggtattttgttgtgtggttagtattaggtttttttttgtagagtttttagttttagtttagattttttagagtagatattttagcgagaatttggatttattgtgtttcgttagtttttggattatgtcgaatttatggatttttttggtatagtatttcgattcggtgtttttttgggtgtagtttttttttttttttttatgtattttttttagtagttttcgggtgttgttgtaaagggttaggatttgataggggacgtgggttattatcgttggtttaggggggttggtgagtttgagtttgtttaagatttgttttttaatggtttttatttttttttttttgatgtggtcgaagtttaaggtggtgtaagtggatagagagaggttgatcgtggtaaagtttagtagggttaggattattagagttttttgtaagtgtatttttatgtgtgagttgggaagagaggttagggggacggtaaggtttggagaggaagagattttagtagacgtgtagaaggagggaggaaaattaggcggtttttttagattttaaagattgaggtttggtaagaaggtgtatgaatttattgtattgcgagagttttaggatttttaggaagcgttggtaattttgaggacgaagaagcggattgtgtgttttgtagcgttgggatttttgtttatgtgtttaaataggttttgttgggttttgatttttagtaggttaggtggagggtaagtagagggttgggaggggtggtaaggtagttgggagtgggaagggagttggagtttttttttaggtaaaaataaatagagtggatatttgatattgttaaacgtcgtttggcgatggggagaaagtgggtattttaaagaagaagtagaaggattatggttgggttttaaaattaaaatttttgttttgttttgaaagaaaataagaaaagagaatggaaaagaaaagggaaaaaaaagtaaaaaaaaaaagattattagtgagtaggtggggagaagtagggtcgggtagttgttggtttagttaaaggtgggggtagtataggatatatttgttttttaggtattttatttatgtttttttttttgtttatattttttcgggggttttttaaatgattttgtttacgttgtttttcgtttttattggttggggtgtggggttatatgtattggaaggtagggaggtaggtttttgagcgtagtagttttaattatttatttagacgtttagggttattagtatttcggtttgttttttgtttcggttattgtttttgttttttgtttttttttaaaaaataaaaaggagaaaaaaataaaataaaatagaagttagtttacggtacgtttgtttcggaaagttgttattttttttttcgtacgtttttttttttgtttttgtttttttcgtttatttttttggatttgattttttgtttttttttttttttttttttttttttttttttttttttcgttttttttttttttttttttatatatatatatatgtatatatattgttttttttatttttttttgttgaaattttatattttttttttatgacgtttttggtttggggtgggggagggagggattagcgtacgtagttttttttgttgtacgatgttaatgttttaaataggtataggaaaagtcgagtttttttgaaaaatattttgcgagttttttcgttcgacgtggtagttgaattttttttttttttttggaattatttttgttatacgttggttgtttttttggaaagttatttcgatgagtttttttttttttttttttttagtttcggcgttttttcgttagttgttagttcgcgtcgttcgcggttcgcgtttatttttttttttggtttttcggtttcggggtcgttcgcgggttaggtttaattcggggtagggttcgtagagggcgcgggattcggtaggggcggttatgttagtttcgtagaggggatttttagtttgcgagtcgggtcggagggtcggcgttcgtttcgcggcgattttggttcgattttttattgataagatcggagtcgggaggcgggtagaagtttggagacgttttaggggtagtgaaaaatggtggcgtttttcggaagatcgagggtgttttttggcgaggcgaggtcgttagtgaaggagttcggttggtcgggagtcggggaggttcgggggttgggggttgcggggtgggggttgaggggcgggagaaggggttgcggtagagagcgagaaaaataagatttaggtttcgaggaatcgtttttttttcggttcgacgtgcgtacgagcgtattttttttttttcgatcgtcgtttcggagtcgttttcgtagaaatgttatttagatgtttagttttttttttcgtcgaggttttcgtagggagttgcgttagcgagcgcgaagttagtagttggttcgagtttattttttagatgggtgaggggaagtcggttttgtgttttcgttttttttttcggttcgaatttttaggtttttttttacgagtagttaagggagggtagggtacgtggtttttcgtatttcgtaatatagggtttgtttttgaattgaatttttttgagagtgagtgtcgtttttattttattttattttagtttttttggattttttttgagaggtttggtttttaggttattaattgaaggggttgttttttgtattttagtatagcggtgggttattttacggatgaggaaattgaggtatagagttttttgtttttttttttatagattatattgtttgtgagtgatggaggcgatattttatataggttatttagtttgggtaggtattatttttatttgtaaaattaatgggaaatttaggggtagaaattttaaaagtaatttgtttaaggttatatagttattaggtgttagttgttgggatttggatttaggacgttgttagattttggatttaattattatgttatattgtttttgaaattttagaaaaagtttaatgtttattatatattaggtattattttaggttttgtgaagaatattagtgaacgaaataaaatttttgtttttagggaaattttattttagaggtaggggtggggtagtggaggaggcgataaattaaataaatatgtaaatgatgtagtacggtaaaaagtgttgagttaggtgtagtggtttacgtttgtaattttagtatttggggaggtttatgtaggaggattatttgagtttaggaattcgagattagttttagtaatacggcgaaatttagtttttataaaaaaatggaaaaattagttcggtatgttggcgtaggtatttatttgggaggttgaggtaggataattatttgagttagggaggtagagtttatagggggttaagattgtattattgtattttagtttggacgatagagtaagatcgtgttttaaatagataagtaaataaataaatgtggtgtggtagaaaattaagtagggaaggaggatggggtgtgtttaggttgggggatgttgtagttttaaatagggtgataagggaaggtttttgagtagatagttgtaagataggaaggaaaattattaaagttatatttttttggattttatttttattaaattagtttttagagttgaggttttggtatttttgtttttttataaattttatacgtgatttaggtgttaagtaagttttggaagttattattgtagggtatttttttgtttagagtgaggattatttgttttttgtttttagtaagttggggaagaagtgggggtgaaggtttggaaattgattataaggtgatggtcgtatgttgtgagtttataagaaatggaaaaatttaaagattaatttttttttttttatttggtgtcgaagaagaagggaataagggatttattggagtttatattttatttgttttggatttttggtaatgagtgtttttttagattaaaatttaataaagtatttttattgagaagtaagttaataaaggattttagagataatttttaaagtaattataagggaggaaattgatagcggaaagggttttgttttgattatataggtagtttttaggagagttaagatgagaatatagtttttttgatatttaggttagtgtttttgttgttataggtatgttaatatatagttttatttagtaatatgtgtgattgaattgagtgatttattggatatttaagaaatgtttgtaatgaggttttaggggtgttatttttattttcgaatttttgtttttaatttgtgtttatttaggttttttttttaatataatattggaatgttgtttgtttttagggttattagtttattttttatggattttagttaattagtgttagggatttggttagtgatattgatttggagattttatatgaagagttaataaagacgtaatttaaatgttttattaggttgggaatttgtggtatatttttttttgttagtttaggagaatggttggtatttagtagtatgtgttggagataaatattttagtaatgtttggtgttagaagggtatttggttttgttgtttggtatttaggtgattttttttaagttttttttttgtattttagtgtgttttattgttgtgttagagatattattgttatttattttgcgggattattgggatttaatgagatattgaatatttgtatttttgaaagttattattatttagttatttgatgtgttgatttagtttttttgtaaattttttgaaggtagagattatgtatattgtagtttttataatttatggtaaattatttattatatttgattttttgtttttttatttgttaaatggaaataatattatttattttgttttttatataaggttgttaatgttttttacgttaagttaataattgtgacggttttttgtattttgtaaagagttgtataagtgggaggtattagtatagtagtagtagtgttttgtatttaatatattgatatatttaaatagagttataaatatagatagtttttaacgattaaattattttatcgtttcgtaggagtagcgttggcgagttttaataatcggaggttgtttttagatgttaagtaaggtagatttaagaaagattcggtagtttggaggatggtatatagaatttaggaattatgttgcgtattttttaaaaattggggtggaggggcggggttgttagtagggacgcgtttgggttagtcggtttttaggaagtgacgttaggcggtcgcggagatggaggatttgttcgatttggacgaggagtttcgttatagtttggttattttcgtgaggattaattcgggggttttgggggttaggatttggcgggtggggaggagcgatttcgtcggtttcgatttttttgaggcgatttagggcggtaggtttcgcgtcgcgtcgggtgaggtttagaaggaggtagttttatcgtttcgtttttaggttattgtgggtttcgtcgttgttggtttggggtttgttttttttaaaatttttagaaagtagaaaatattttgttttcgtcggcgtttaggatcgtgggaaattttcgagttttttttcgttttttagagtttcgagtgcgaatttttt

SEQ ID NO: 2217 - DNA, 14708 bp, Artificial Sequence
  chemically treated genomic DNA (Homo sapiens)
ggttgtatttttttgtttttatttttttgttttttttatttgttttagtttggttatattagtattttgggttttttgttttgtgtttgtttgtttgtttgtttgtttgtttgtttgttttgggatggagttttattttgttatttaggttggagtgtagtgatatgattttggtttattgtaatttttattttttgggtttaaatgatttttttgttttagttttttaagtagttgggattataggtatttattattatatttagttaatttttgtatttttgtagagatgaggttttgttatgttggttaggttggttttaaatttttgattttaggtgatttgtttattttagttttttaaagtgttgggattataggtgtgagttattgagtttagtttgttttgttgttttttgagatggagttttattttgtcgtttaggttggagtgtagtggtataattttgtttgattgtagtttttattttttgagtttaagagatttttttgttttagttatataagtagttgggattataggcgcgtgttattatatgcgtttaattttggtatttttagtagcgatggggttttgttatattggttaggttggtttcgaatttttggttttaagtgatttgtatatttcggttttttgagtagttgggattataggcgtgagttattatgtagggtttttttggttttttaacgtataaagttattttttagttttgggtgtttatagtattattgttagtttttggaaagttttttttagaagtttttatatgattgattttttatttttttttaggttttagtttaaatgttttttttttagagagtttttttttgattattttatgtaatgtgtttttttttagttagtttttttttattttgtgtattttttttagagtatttattattattttggttttgatgtttgttggtttatatgtttgttgtttgttttttatatagaaagtaaattagttttttatttgttttgtttattattttattttagtatagtgattaatatatattagtagttaattaataaatagttataagttaggtacggtgatttatatttgtgattttcgtattttgggaggttaaggtgggcggattttttgaggttaggaatttgatattagtttgtttaatatggcgaaatttcgtttttattaaaattataaaaattagtcgagtgtgatggcgtgcgtttgtaatattagttatttgtgaggttgaggtaggagaatcgtttgaattcgggaggtagaggttgtagtgagtcgagattatattatagtattttagtttgggtgatagagtaagattttgttttaaaaaaataagaaatagaaatatatatatgttgttataagaaatttattattttttagtaaaaaatatagatttttaattaaagaaaggggaaatttttttttaaataattttagaattcggggtagaaaacgttatatgtggaaattcgttttgaaaaatagtttcgtttgtgaataggaaatatttggattatattttttttatttttacgaaggatttaaatgtgtagtattgatgaagaggtagttagttttagtttttattatttttgtatattttatttgtttttttttatggtatagttttgggggtaggttataaattcgtaagatgttattagtattattggttaagatgtaggaatcgttaggagttttagaaataggggagagttagaaagttggttagatttatgttttttaagtgtagggttagggttgagtttgtttttggggtaggtaagtttttttgaatttttgagggaagtagaagatataaattgttagataaaatgtaagtttagtttaaaagggttacgtgtcgttttttttagttttggggtattttttttttagaaaattggattgttttatagtgaaaatttcgggggtggttagttttttgtttcgttgttatttttattatttatagttttttaagaagtttttaggttgggtgttgaattttgattaggaattattgagaaatcgaggtagttgggagaagttgtagttttaagcgttgaaaggaagatgggggataataaatttgggtcgttaagtaaagggggtagaggtttggagaagtgggttttaggattagaggatagatcgattttatattttatttttttagattttatattttattgttattattatttacgtgtttttttcgttttttgtagcgggttttttagaggtattttttatggtttttttagattttaattttggttcgttcgttttttttttagaaaggttttcgtttgttttttttgtaggaaggtttgtatttttagaaagtttttgtttttcgattcgaggatttaatttattaggggaattaaattttgtttttaggggagtggagagagaaattgggtttttttttcgtagtttttgggatatagttgagttagttataggatttggggataatcggggcggattttttttttcgggaggcggtggtattagtttagagttcgtatttttatttatcggggaagcgtggggagaaggatgggttggagttgggttttggtttgaaggatagtagttcggagttaacggttgagtttttaaagtttttatattgtagaggaagtatagcggagattagttttagttaggatggtttcgaagtttttagggattcgacgtagagttaaagaaatttatttgtgtttttttttttttttgggagtaggtagaagattttcgggaggagaggcgaatagcggacgttaatttttttgaaagtattgtgttttttagtatcgcgggtcgttacgggttttttgttgtcgcgggatttcggtttatttttcgattgggtcgtcgtatttcggattagatttcgcgggcgatttacggaattcgcggagtcgggacgtgaaaggttagaaggtttttcgtttttattaagttttagggtttttcgtggttgttgggagttgtagtttgaacgtttttattttggcgagaagcgtttacgttttttttatcgagtttcgcggtaatttttaaagtatttgtatcgttttttcgtcgtttgtagagggcgtagtaggttttgtattttttttgtattttattttttaggttttagatttgttttttttatttaaaaaatatttattatcgagtttttatttgttatttagtattgatataggtatttaggaatataataatgaataagatagtagaaaaattttatatttttataaggtttacgtttttatgtattgaaagtaatgaataaataaattttattagagtgataagggttgtgaaggagattaaataagatggtgtgatataaagtatttgggagaaaacgttagggtgtgatattacggaaagtttttttaaaaaatgatattttaattgatgagaagaaaggatttagttgagagtaaacgtaaaagtttttttttttttattttttatatttgatataatgtaggatttttttaaaatgatttttattaattttgtttttatagttttggtttgtagaattttttattttaaaatgttagtatttacggtattaggtcggcgagaattttgattttgtatttttttttttaattttattttttttgtttttttcggtaggcggattatttgtttttatttgttatggcgattgtttagttttgtgttaggagtttcgtaggggttgatgggattggggttttttttttttatgtgtttaagattggcgttaaaagttttgagttttttaaaagtttagagttatcgtttagggagtaggtagttgttgggtttcggggatattttgcgttcgggttgggagcgtgttttttacgacggtgatacgtttttttggattgggtaagtttttgattgaatttgatgagttttttttgagttacgggttttcggtttcgtgtatttttagttcgggaaaatcgttggggttgggggtggggtagtggggatttagcgagtttgggggtgagtgggatggaagtttggttagagggattattataggagttgtattgttgggagatttgggtgtagatgatggggatgttaggattattcgaatttaaagttgaacgtttaggtagaggagtggagttttggggaattttgagtcggtttaaagcgtatttttttgtatatttattcggtgttgggcgtagggaatttttgaaataaaagatgtataaagtattgaggtttgagatttttggatttcgaaatattgagaatttatagttgtatattttagagtttatggtattttagtgaaaattggggttttatttcgaaatgattatttgggggtgattcggggagtttaagttgttaaggttttataattttcggatttttgttttttttggagcgatttttttaggtagttttcggtttcgttagatggagaaaatttaattgaaggttgttagtcgtggaagtgagaagtgttaaattaggggtttgttcgttaggtcgaggaggatcgtcgtaatttgagaggttcggtagttttgttattgtttggttttatatttatatttttgttttttgtagtagtattttcggtttttttttgtcggagtagtttattatttattcgatgagaggggaggagagagagagaaaatgttttttaggtcggttttttttatttggtagagggaggttgttatttttcgtttgtatttttttttttggattatttagttatggtttttgtaaaggtaggggtatttgttttgatgtaaattttaatttttttttttttttgaatggtgtgttttatttcgcgggtcgtttgtaatttaggcggacgttattatggcgtgagatagggagggaaagaagtgtgtagaaggtaagttcggaggtatttttaagaatgagtatattttattttttcggaggaaaaaaaaaaagaatgggtacgtttgagaattaaattttgaaagagtgtaatgatgggtcgtttgataatttgtcggaaaaataatttatttgttatttagttttgggttaggttattttagttttagacgtaggttgaacgtcgtgaagcggaaggggcgggttcgtaggcgttcgtgtggtttttcgtgtagtttttcggttcgagtcggttttttttggtaggaggcggaattcgaatttatttttttcgttgttttattttttagttcgcggttgttttatttcgtagtttttttttatgtatttgtcgcgtatcggttattttgtgtcgtatttacgttattttttttttaaatcgaggtggtatttatatatagcgttagtgtatatagtaagtgtataggaagatgagttttggtttttaatcgtttcgtgatgtttattaagttatagattttttttatcgttttagaaacgttttattacgtttttttttagtcgattttcgattttatttttattttgatttttataattattttgtttgttggagaattttatatagaatggaattaggttgggcgttgtggtttacgtttgtattttgggaggtcgaggcgggcggattatttgaggataggagttttagattagcgtggttaacgtggtgaattttcgtttttattaaaaaatataaaaattagttgggcgtggtgggtgtttgtaattttagttattcgggagggtgaggtaggagaatcgtttgaattcgggaggtagaggttgtagtgagttaagatcgtgttattatattttagtttgggcgataagaacgaaatttcgttttaaaaaaaaggggggaattatatattatgtgtttatttttgtcgggtttttgttttttaatgtattgtttgatattcgtttatgttgtatatattagtattttgtttttttttatttagtatagtttatcgattgtatattcgtttttttgatggttttttgagttgttttttatttgcggttatgaaataaagttgttataaatatttttgtataattttttttgtgattatatgttttcgtgttttttggagaaatatttaggaggggaattgcgagtttggaagtaaaaagtagttgtattttgaatttttttagaagttttgagttttttagagcggttgtattattttatattttaattagtaaggtatgggagttattatggttgtgttatagtttttcggatattaggtattgttagtttttttaatgtggtatatttttgtggttgtaatttatagttttttattgattaaggatgtttagtatttttttatgtgtttattggttattcgtattttgtttgtaaagtagtttttcgagttttttatttgttattttggttttttgtttgtttttattgtttagttgtgggattgttttatatattttggatataagttttttattagatttatgtgtcgtgaatgtttttttttgatttgttgtttgtttatttgtttgttttatagagtttatagtattttaagaggagtggatttattttttttatgtttagtatttgttttgttttgtttaggatatttttttttttttttttaattttagggttatgaagatattattttatatttttttttaggatttttatggttgtaagttttatagtaaggtttttgagttattaattaatttttaaaattaattgtttatggtgtgaggtgtaggagttagtttttggtattttttttgtatggaaatttagttattttgtttttatttgttgaaataggttttttttttttattgaatgtttttaattttaattattttatagttggagtatagggttattattttagtgttattttttttttttttttgttaatttttgagatagggatttatattgttgtttaggttagagtataatggtataattaaggtttattgtagtttcgaatttttgggtttaagtagttttttagtagttttacgagtagttgggattattttattatatttagttaattattttatttttttgtattgataggattttattatgttgtttaggttggttttaaattgttggttttaagtttttattttatttcggttttttaaagtgttgggattataggtgtgagttattatgtttgattttttagtgttattttttatttattttttttgttttttgttttttttaaacgttggaggaagaaatagtatttattttatataaattttttagaaaatagaggaatagattgggcgcggtggtttatatttgtaattttagtattttggtacgttgaggtaggggattatttgaggtcgggagttcgagattagtttggttaatacggcgaaattttatttttattaaaaatataaaaagtagttaggcgtggtgatatatatttgtaatgttagttatttaggaggttgaggtataagaattttttgaatttgggaagcggaggttgtagtgagtcgagattgcgttattgtattttagtttgggtaatagagtgagattttgttttagaaaaaaaaagaaagaaagaaaaaatagaggaatattttttaatttgttttcgaagttagtataattttggtattaaaattaaataaggatattataagaaaagaaaatatagattaatatttttgttagtatagatatgtaatagttaattaattttagtaaattaaatttggtaatatagaaaaaaggataaataggttagtcgcggtggtttacgtttgtaattttagtattttgggaggttgaggtaggtagattatttgaggttaggagtttgagattagtttgattaatatggtgaaatttcgtttttaataaaaatataaaaattaggttgggtacggtggtttacgtttgtaattttagtattttgggaggtcgaggtgggtagattacgaggttaggagtttaagattagtttgattaatgtggtgaaacgttatttttattaaaaatataaaaattagtcggtgtggtggtatttgtttgtaattttagttatttaggaggttgaggtagaattgtttgaattcgggaggtagaggttgtagtgagttaagatcgtgttattgtattttagtttgggcgatagagtaagattttattttaaaaaaaaaaaaaaattagttgggtatggtggtgggtatttgaaattttagttattcgggagtttgaggtaggagaatcgtttgaatttaggaggtagaagttgtattgagttgggattatattattgtattttagtttgggtaatagagtgagattttattttaaaaaaagaaaaagaaaaaggataaatatattttaattaaataatgtttattttatgattgtagttgatttaatatttaaaaattggtttggtgtagtagtttaggtttgtaattttaatattttaggaggttgaggtaggaagattttttgagtttaggattttaagattagtttgggtaatatagttagattggtttttattggggggaaaaaaattagtttgtgtaatttattatattaataaagggaaatataaaaattttatgattattttaatagatgtagtaaaagtagttaatgatatttaatatatatgtatgattataaattaattaattttttagtaaattagggaaaggaaatttaatttagtttgataatagggcgtttatagtcggagttttattagtagtatatataatggtagaaaatttagtgttgtcgggcgcggtggtttacgtttgtaatgttagtattttgggaggtttaggcgggcggattacgaggttaggagatcgagattgttttgattagtatgttgaaatttcgtttttattaaaaatataaaaataaaaaattagtcgggtatggtggcgggcgtttatagttttagttattcgggaggttgaggcgagagaatggcgtgaattcgggaggcggagtttgtagagtttagatcgtgttattgtattttagtttgggtgatagagtgagatttcgttttaaaaaaaaaaaaaaaaaaaaaagaaaagaaaatttaacgtttttttttttaagattaggaattagaaaaggatttgatttttataacgttgatattatattggaggttttaattaggtaagaaaaagaaataatgagggtcgggtgcggtggtttaggtttgtaattttagtattttgggaagtcgagacgggtggattacgaggttaggagatcgagattattttggttaatacggtgaaattttgtttttattaaatatataaaaaattagtcgggcgtagtggcgggcgtttgtagttttagttattcgggaggttgaggtaggagaatggcgtgaatttagggggcggagtttgtagtgagttgagatcgagttattgtattttagtttgggcgatagagtaagattgtgttttaaaaaaaaaaaaagaaaaagaaataatgattagtggttcgatgttttacgtttataattttagtattttgggaggtcgaggtgggtagattatttgaggtttggagttggagattagtttgataaagatggtgaaatttcgtttttattaaaatattaaaaaaatagttaggcgttggtcgggtatagtggtttatgtttgtaattttagtattttgggaggtcgaggtgggtggattatttgaggttaggagtttaatattagtttggttaatatggtgaaattttatttttattaaaaatataaaaattagtcgggcgtagtggcgggcgtttgtaattttagttatttgggaggtttaggtaggagaatcgtttgaatttgggaggcggaggttgtagtgagtcgagattgtattattgtattttagtttgggtgataaaagtaaaaatttcgttttaaaaaaaaaagaattagttaggggtagtggtgaacgtttgtagttttagttatttaggaggtagaggtaggagaattatttgaatttaggaggtagaggttgtagtgagtcgagattgttttattgtattttagtttaggcgataagagtaaaattttatgttaaaaaaaaaaaaaaaaaaggaaagaaaaaaaataacgattagaaaggaagaaataaaatatatttatagttagtatgattttatatatatatgttttaatggggttaggcgtggtggtttatgtttgtaattttagtatttttaggaggttgaggtaggtggtttttttgggattagtttggttaatatggtgaaattttaattttaataaaaatataaaaaattagttaggcgtggtgacgggtatttttaattttagttatttaggaggttgaggtaggagaattgtttggatttgggaggtagaggttgtagtgagtcgagatcgcgttattgtattttagtttgggtaataagagtgaaatttcggtagggtgtggtggtttacgtttgtaattttagtatttcgggaggttgaggtaggtcgattatttgaggttaggagtttgagattaatttaatatggtgaaatttcgtttttattaaaaatataagaattagttgggtgtagtggtgggcgtttgtaattttagttatttgggaggttgagatagaagaattgtttgaatttaggaggtggaggttgtagtgagttgagattatgttattgtatattacgtcgggtaatagagcgagatttcgttttaaaaaaaaaaaaaaagagtgaaattttattttaaaaaaaaaaaaaagttttaatggaaaatttataaaaagttattaaaattaataaataaatatagtagggttgtaggttatagggtaatatagttatttttttatttgtaggggtttggttttgggattttttatatattaaatttatagatgtttaagttttatatataagacggtatagtatttggatttaatttatatatatttttttatatagtttaaattatttttagattatttatattatttttatataatgaaaatgttaatgtatatgtaagtatgtatgtaagtatttgtattatattgtttagggaattattggatatataggtttttaagattgatattagtagttattgttaagattttggttaggtttgtttttgtttggggttttagttgattttattgtttttttatttagttaagggtatttgtattttttttggttttttggttatttggaaggtttagtttagtttggtatatttgtattttggtttattgatgttggtatttttgggaaggttttgttttgaaaaatacggagattttagttgttattgaagatttgagagataaagatagggagatttgtttgtagatttgtgtttttttaagtgggattgagattttgggttttttattttaggatagtattttttggtttgttgattgaatagatttttgaaggaggtgtatttgtattaatggagtgggggtgggagtagtattatagattcgtattaataattatatagttttttttagaataataatatagaataagtgaaatagaataattgtagaaagagttaatttttgttgagtttttattgtgtgtttagtattttttttaattttatattttttataatatatagagtattaggtaggttaggtttggtggtttacgtttgtaattttagtattttaggaggttaaggggggtggattatttgaggtcgggagtttaagattagtttgattaatatggtgaaatttcgtttttattagaagtataaaattagttaggtgtggtggtatatgtttgtagttttagttatttagtaggttgaggtaggagaattatttgaattcgggaggaggttgtagtaagcggagatagtgttattgtattttagtttgggtaataagagttgagatttcgttttaaaataaaataaaataaaataaaataaaataaaataaaataaaaaaagaaaagagtttgttattaaaggagttgtttggtaggggatgttttgttagtgtaaataatagaaaagtgggttgggtatagtggtttatgtttgtaattttagtattttgggaggttaaggcgggcggattatttgaagttgggagtttaagattagtttgattaatatggagaaatttcgtttttattaaaaatataaaattagtcgggcgtagtggcgtatgtttgtaattttagttattcgggaggttgaggtaggagaatcgtttgaatttgggaggtagaggttgcggtgagtcgagatcgtattattgtattttagtttggacgagagtaaaattttgttttaaaaaaaaaaaaaaatagaaaagtgtaataaatatttatagtaggtatgttttttagtaaatttgatgataaatttggtataaagaaagagagtatttttgaaaaaaaaaaaaagaaaaagaaagagagtattttgtttgggtaatatagtgaaattttgtttttataaaaaaatttaaaaattggtcgggtgtagtggtttatatttgtaattttagtattttgggagtcggaggcgggaggattatttgaggttaggagttcgaaattagtttggttaatatggtaaaattttatttttattaaaaatataaaaaattaattaggcgtattggtgggcgtttgtaattttagttatttaggaagttgaggtaagaggatcgtttgaatttgggaggtggaggttatagtgagtcgagattatattattgtattttagtttgggtgatagggcgagatttcgtttttaaaaaaaaaaagaaaaagaaaaagattaaaaaattagttaggtaggtttttgtggttttagttatttgggaggttgaggtaggagaattattgagtttaggagttcgaggttgtagtgagttatgattgtattattgtattttagtttgggtaataaagtaagattttgttttaaaagaaaaaagaaagaaagaaagaatatggcgggttaggtatagtggtttatatttgtaattttagcgttttgagaggtcgaggtaggtggattataaggttaggagttttatattagtttggttaatatggtgaaattttgtttttattaaaaatataaaaaattagttaggtatggtggtaggggtttgtaattttagttattcgggaggttgaggtaggagaattgtttgaaattagaaggtagaggttgtagtgagtttagattgtattattgtattttagtttgggcgaaaagagttaaattttattttaaaaaataaataaaaaaataaaataaaagaaaatatggtaaagtttttgaaagtttgtttgggagaaggtgcgatgatagttgtataatttcgtgtaagatgttggtttatataggggttgttttttgttttttttcgtttttttaattttttatataataggtttgtgtgttatttatatttattgagtttaagtaggtgtaaggtattgtgatttaatattttggttagtaagataataagatagattattgttttgtttttaggaagtgtatatgttattagaggaaatagataaaataaataaggaaaagtattagataatgtaagtgttatgagaatgtaaatgaggtgatgtgaattaaaataggatgatttaaagtttgtacgggaaggagtttatttttatgtttttggttagttaaggaattattagttgattagtagagaagggtagttagtttagttagagtttttggggaagagggagtggttgttaagagatgagattaaagaagtcgagacgggttattcgtgaggggtttgtaatgtagggttgaggagtgttcgaagagaatgggtaggtgagcggtgagatagttgtttttttagaagttttgtagtgaaaggaattaaagaaatggagtcgtgtattaggtggggaagggtgggggttaagggggtgtttttttttatatagagattgtaggttgagaatgattatatttttgttaataggaggtgggagtagggtacggtagtttatatttgtaattttggtattttaggaggttgaggcgggtcgattatttgaagtaaggagttcgagattagtttggttaatatgtaaagttttgtttttattaaaaatataaaaattagttgggtgtggtggtattcgtttgtaattttagttattcgggagattgaggtaggagaatggtttgaattcggaaggtagaggttgtagtgagttgagattatgttattgtgttttagtttaggtgatagagagagattttattttaaaaaaaaaaaaaaaatataggaagggagttgggaatagggtgtatatttaggaagttttggggatttagtggtgggaaggttggaagtttttttttgattgttttttttttaaagaagtgtatggttggtgaggggtggggtaggagtgtttgggttgtggtgaaatattggaagagagaatgtgaagtagttattttttttttgttttataggaagtcgagttgttttagatattggtatggtgttgggggagggggttttttttttgtaggtttaggtgatttagggttggaagtgttttatgttggatttttatttttttttttgtagt

SEQ ID NO: 2218 - DNA, 14708 bp, Artificial Sequence
  chemically treated genomic DNA (Homo sapiens)
gttgtaagaggaaaagtggggatttagtatgagatatttttaattttgggttatttgggtttgtagagaaggaatttttttttttaatattatgttagtgtttgagatagttcggttttttgtggagtaggaaaagaatggttgttttatatttttttttttaatgttttattataatttaagtatttttgttttattttttattagttatgtatttttttgaggaaaagataattagagagggatttttaatttttttattattaaatttttaagattttttaaatgtgtattttatttttaattttttttttgtattttttttttttttttgagatggagtttttttttgttatttaggttggagtatagtggtatgattttagtttattgtaatttttatttttcgggtttaagttatttttttgttttagtttttcgagtagttgggattataggcgagtattattatatttagttaatttttgtatttttagtagagatagggttttgtatgttggttaggttggtttcgaattttttattttaggtgatcggttcgttttagttttttaaagtgttaagattataggtgtgagttatcgtgttttgtttttattttttgttaataaggatatagttatttttagtttgtaatttttgtatggggaaggatatttttttggtttttatttttttttatttgatatacggttttatttttttgattttttttattgtaaagtttttggaagaataattgttttatcgtttatttgtttatttttttcggatattttttagttttgtattataaattttttacgaatggttcgtttcggtttttttaattttattttttaataattatttttttttttttaaaagttttagttagattggttgtttttttttgttaattaattggtggttttttggttagttaggaatatgggggtaggttttttttcgtgtagattttaagttattttattttaatttatattattttatttgtatttttatagtatttatattgtttgatatttttttttgtttattttatttgttttttttaatagtatatatattttttaagggtagggtagtgatttattttgttgttttgttgattaaagtattagattataatgttttgtatttgtttgggtttaataaatgtgaataatatataagtttgttatatgagaggttaagagagcgagaaagagtaaggggtagtttttgtgtggattagtattttgtacgaagttatgtaattattatcgtatttttttttagataagtttttaaaggttttgttatgtttttttttgttttgtttttttgtttgttttttgagatggagtttggtttttttcgtttaggttggagtgtagtggtgtagtttaggtttattgtaatttttgttttttggttttaagtaatttttttgttttagtttttcgagtagttgggattataggtttttgttattatgtttggttgattttttgtatttttagtagagatagggttttattatgttggttaggttggtgtggaatttttgattttgtgatttatttgtttcggttttttaaagcgttgggattataggtgtgagttattgtgtttggttcgttatgttttttttttttttttttttttttttgaggtagggttttgttttgttgtttaagttagggtatagtggtgtaattatggtttattatagtttcggatttttgggtttagtgatttttttgttttagttttttaagtagttgggattatagaggtttgtttggttaattttttagtttttttttttttttttttttttttggagacggagtttcgttttgttatttaggttagagtgtagtggtgtgatttcgatttattgtaatttttattttttagatttaagcgatttttttgttttaattttttgagtagttgggattataggcgtttattaatgcgtttgattaattttttgtatttttagtagagatggggttttgttatgttggttaggttggtttcgaatttttgattttaggtgattttttcgttttcgatttttaaagtgttgggattataggtgtgagttattgtattcggttaatttttgagtttttttgtagaggtagggttttattatgttgtttaggtaggatgtttttttttttttttttttttttttttttagggatgttttttttttttatgttaaatttgttattagatttgttaagaaatatgtttattgtaagtgtttgttatatttttttgtttttttttttttttgagatagagttttgttttcgtttaggttggagtgtaatggtgcgatttcggtttatcgtaatttttgttttttaggtttaagcgatttttttgttttagtttttcgagtagttgggattataggtatgcgttattgcgttcggttaattttgtatttttagtagagacggggtttttttatattggttaggttggttttgaatttttaattttaggtgattcgttcgttttggttttttaaagtgttgggattataggtatgaattattgtgtttagtttatttttttgttgtttgtattgataaaatattttttattaaatagtttttttaatggtaggtttttttttttttttattttattttattttattttattttattttattttattttgagacggagttttagtttttattgtttaggttggagtatagtggtattattttcgtttattgtaattttttttcggatttaaatgatttttttgttttagtttgttgagtagttaggattataagtatgtgttattatatttggttaattttgtatttttagtagagacggggttttattatgttggttaggttggttttgaattttcgattttaggtgatttattttttttggttttttaaagtgttgggattataggcgtgagttattaagtttggtttatttagtattttgtgtattatgggaaatgtagagttgaggaaagtgttgggtatatagtaagagtttaataaaggttagttttttttgtaattgttttattttatttgttttatattattattttagagagaattgtgtgattgttagtgcggatttgtggtattgtttttatttttattttattaatgtaagtatattttttttagggatttatttagttaataggttaggaggtgttgttttgaaatggggggtttaaagttttaattttatttggagggatataggtttatagataggtttttttgtttttattttttaaatttttagtagtaattaaaattttcgtgttttttagagtaggatttttttaggggtattagtattagtgggttaggatataaatgtgttaggttgaattaggttttttaaatggttagggagttaagagaaatgtaggtgtttttggttgggtgggaaggtaatgagattaattgagattttaaataggggtaggtttgattagaattttaatagtggttgttggtattagttttgaaggtttatatgtttagtgattttttaaataatatagtataagtatttatatatatatttgtatgtatattagtatttttattgtatgggggtaatgtaagtaatttagagataatttaaattatatgggaggatatgtgtaggttaaatttaaatattatatcgttttatatatgggatttagatatttgtgggtttggtgtgtgaggagttttagaattaagtttttatagatagagggataattatattgttttgtaatttgtaattttgttatatttatttattagttttggtagttttttatggattttttattaggatttttttttttttttgagatagagttttattttttttttttttttttgagacggaatttcgttttgttgttcggcgtggtgtgtaatggtatgattttagtttattgtaatttttattttttgggtttaagtaatttttttgttttagttttttaagtagttgggattataggcgtttattattatatttagttaatttttgtatttttagtagagacggggttttattatgttaggttggttttaaatttttgattttaggtgatcggtttgttttagtttttcgaagtgttgggattataggcgtaagttattatattttgtcggagttttatttttgttgtttaggttggagtgtaatagcgcgatttcggtttattgtaatttttgttttttaggtttaagtaatttttttgttttagttttttgagtagttgggattagaggtgttcgttattacgtttggttgattttttgtatttttattagagttggggttttattatgttggttaggttggttttagggaagttatttgttttagttttttaaaagtgttaggattataggtatgagttattacgtttggttttattaggatatgtatgtatagaattatattggttgtgaatgtgttttatttttttttttttaatcgttattttttttttttttttttttttttttttttttgatatggaattttgtttttgtcgtttaggttggagtgtaatgggataatttcggtttattgtaatttttgttttttgggtttaagtgatttttttgtttttgttttttgagtagttgggattataggcgtttattattatttttggttaatttttttttttttgagacggagtttttgtttttgttatttaggttggagtgtaatggtgtaatttcggtttattataattttcgttttttaggtttaagcgatttttttgtttaagttttttaagtagttgggattataggcgttcgttattacgttcggttaatttttgtatttttagtagagatggggttttattatgttggttaggttggtgttgaatttttgattttaggtgatttatttatttcggttttttaaagtgttgggattataggtatgagttattgtattcggttaacgtttggttatttttttaatattttaatagagacgaggttttattatttttgttaggttggtttttaattttagattttaggtgatttgtttatttcggttttttaaagtgttgggattataggcgtgagatatcgggttattaattattatttttttttttttttttttttttgagatatagttttgttttgtcgtttaggttggagtgtagtggttcgattttagtttattgtaagtttcgttttttgagtttacgttatttttttgttttagtttttcgagtagttgggattataggcgttcgttattacgttcggttaattttttgtatatttagtagagatagggttttatcgtgttagttaggatggtttcgattttttgatttcgtgatttattcgtttcggttttttaaagtgttgggattataggtttgagttatcgtattcggtttttattattttttttttttgtttggttaaaatttttagtatggtattaacgttgtgagagttaaatttttttttagtttttgattttagaggaaaaagcgttgagttttttttttttttttttttttttttttttttgagacgaagttttattttgttatttaggttggagtgtagtggtacgatttaggttttgtaagtttcgtttttcgggtttacgttattttttcgttttagtttttcgagtagttgggattataggcgttcgttattatgttcggttaattttttgtttttgtatttttagtagagacggggttttagtatgttagttaggatagtttcgattttttgatttcgtgattcgttcgtttaggttttttaaagtgttggtattataggcgtgagttatcgcgttcggtagtattgagttttttattattatgtatgttgttagtggaatttcgattgtggacgttttgttattaaattaggttaagttttttttttttagtttgttaggaggttggttggtttgtaattatgtatatgtgttgaatattattaattgtttttgttatatttgttgaaatgattatagggtttttatgtttttttttgttaatgtggtgaattatatagattgatttttttttttttagtaaagattagtttgattatgttgtttaggttggttttgaaattttgggtttaagagatttttttgttttagttttttaaaatgttgggattataggtttgagttattgtattaggttaatttttgaatgttgaattagttataattatgagataaatattatttggttagaatgtatttattttttttttttttttttttttgagatggagttttattttgttgtttaggttggagtgtaatggtgtgattttagtttagtgtaatttttgttttttgggtttaagcgatttttttgttttagattttcgagtagttgggattttaggtgtttattattatgtttagttaatttttttttttttttgagatgaagttttgttttgtcgtttaggttggagtgtagtggtacgattttggtttattgtaatttttgtttttcgggtttaagtaattttgttttagttttttgagtagttgggattataggtaggtgttattatatcggttgatttttgtatttttagtagagatggcgttttattatattggttaggttggttttgaatttttgatttcgtgatttgtttatttcggttttttaaagtgttgggattataggcgtgagttatcgtgtttagtttgatttttgtatttttattagaaacggggttttattatgttggttaggttggttttaaatttttgattttaagtgatttgtttgttttagttttttaaagtgttgggattataggcgtgagttatcgcgattggtttatttatttttttttttatattattaggtttggtttgttaaaattggttagttgttgtatgtttatgttaataggaatattggtttatattttttttttttataatgtttttgtttggttttggtattaggattatgttggtttcgaaaataagttgggaaatatttttttattttttttttttttttttttttttttgagatagggttttattttgttgtttaggttggagtgtagtggcgtaatttcggtttattgtaattttcgttttttaggtttaagggatttttgtgttttagttttttgagtaattggtattataggtatgtgttattacgtttagttattttttgtatttttagtagagatggggtttcgtcgtgttggttaggttggtttcgaattttcgattttaaatgattttttgttttagcgtattaaagtgttgagattataggtatgagttatcgcgtttagtttgtttttttgttttttgaagagtttgtgtaagatgggtattgtttttttttttaacgtttaaagagagtagagaatagaggagataaatagaaaatagtattaagaggttaggtatggtggtttatatttgtaattttagtattttgggaggtcgagatgggatgaaagtttgaggttagtagtttgagattagtttgggtaatatagtgagattttgttaatataaaaaaataaaatagttagttgggtgtggtggagtaattttagttattcgtgaggttgttagaggattgtttgagtttaggggttcgaggttgtagtaagttttgattgtgttattgtattttagtttgggtaatagtgtgagtttttgttttaaaaattaataaagaaaaaaagaaaatagtattaaaatggtagttttatattttaattgtaaaataattaaaattaaaagtatttagtagagaaaggaagtttattttaataagtggagatagaataattggatttttatataggaaagatattagagattgatttttatattttatattataaataattaattttaagaattaattaatggtttaaggattttattgtaaaatttataattataaaggttttaaaagaaaatgtaagataatatttttatgattttggggttaaaaaaaaaaaaaaagatgttttaaataggataaggtaaatattgaatataaaaaagataaatttattttttttaagatattgtaaattttgtaaagtaaataaataggtaagtaatagattagaagaaaatatttacgatatatggatttgataaaggatttgtatttagaatgtataaagtagttttataattgaataataaaaataaataaaaaattaaaataataggtaaaagattcgaagagttattttataaataaaatacgaatggttaataggtatatgaaaaaatgttgaatatttttagttaatagagaattgtaaattataattataaggatatattatattagaaagattgataatatttaatgttcggaaggttgtggtataattataataatttttatattttgttagttggagtgtaaaatggtataatcgttttggaaaatttagagtttttgaaaaagtttaaaatatagttattttttatttttaaattcgtaattttttttttaagtatttttttaagaaatacgaaaatatatgattataaaaagaattgtataagaatgtttatagtagttttattttataatcgtaaatgggaaataatttaaaaggttattaaaaggacggatatataatcgatggattatattaaatgaaaaggagtaaaatattgatatatataatatgaacgaatgttagatagtatattgaaggatagaagttcgataaaaatgagtatataatgtatgattttttttttttttttgagacggagtttcgtttttgtcgtttaggttggagtgtagtggtacgattttggtttattgtaatttttgtttttcgggtttaagcgatttttttgttttattttttcgaatagttgggattataggtatttattacgtttagttaatttttgtattttttagtagagacggggatttattacgttggttacgttggtttggaatttttatttttaagtaattcgttcgtttcggttttttaaagtgtaggcgtgagttatagcgtttagtttgattttattttatatgaagttttttaataggtaaaatggttatggagattaaaataaaggtggggtcgggaatcgattgggaagagacgtgatgaaacgtttttgggacgatgaaaagggtttgtgatttggtaggtattacggagcggttaggggttaaaatttatttttttgtgtatttgttgtgtgtattggcgttgtgtgtaaatgttatttcgatttaggaaaaagatgacgtaagtacggtataaagtggtcggtacgcggtaggtgtatgggaagaaattgcggaatgaaataatcgcgagttaagagatggggtagcgggagaaatgaattcgagtttcgttttttattaggaagaatcggttcgggtcggagggttgtacggaggattatacggacgtttgcgggttcgtttttttcgttttacgacgtttagtttgcgtttggaattggaatggtttagtttaaagttagataataggtagattgttttttcgataaattattaaacgatttattattgtatttttttaaaatttgatttttagacgtatttattttttttttttttttttcgggaagatgagatatatttatttttgaaaatattttcgggtttgttttttgtatatttttttttttttttgttttacgttatggtagcgttcgtttaggttgtaggcgattcgcggggtggggtatattatttaaagaaggggagggattgaggtttgtattaaaataaatatttttgtttttgtaaaggttataattaagtaatttagaaaaagaaatgtaggcggagaatagtagtttttttttgttaagtaagaggaatcggtttaaaggatatttttttttttttttttttttttttatcgggtgaatagtgagttgtttcggtaaaaagaaatcggaaatgttgttgtaagaggtagaaatgtaaatgtggagttaaataataatagggttgtcgggttttttagattgcgacggtttttttcggtttggcgggtaaatttttggtttagtattttttatttttacgattgatagtttttaattggattttttttatttagcggagtcgggggttgtttggaaagatcgttttaggaaggataaaggttcggaagttgtgggattttagtagtttgggtttttcggattatttttaaatgattatttcggaatggagttttagtttttattaggatgttatgggttttaaaatatatagttatgagtttttaatgtttcgagatttaaaagttttagattttaatgttttgtgtattttttattttagggattttttacgtttagtatcgggtggatgtgtaaagaagtacgttttaggtcggtttaaggttttttaaagttttatttttttgtttaggcgtttaattttgagttcggatggttttaatatttttattatttatatttaggttttttaataatgtaatttttatgatgatttttttagttaagtttttattttatttatttttaaattcgttaagtttttattgttttatttttagttttagcgattttttcgagttgaaaatatacggagtcgagagttcgtgatttagagaggatttattaagtttagttaggagtttatttaatttagggaagcgtgttatcgtcgtggaaagtacgtttttagttcgaacgtaaagtgttttcggagtttagtagttatttgttttttggacggtggttttagatttttgagaagtttaaaatttttagcgttagttttgagtatatgggaggggaaaattttaattttattaatttttgcgaggtttttggtataaagttggatagtcgttatgataagtaagggtaagtaattcgtttgtcggaggaagtaaaggaaatggagttggggaggagggtgtagagttaggattttcgtcgatttggtgtcgtagatattaatattttggggtggaaaattttgtaagttagagttgtgagggtagaattggtggaaattattttggaggaattttgtattgtgttaaatatgaagggtggaaggaagaaagtttttgcgtttgtttttagttggattttttttttttattagttaaaatgttattttttaggaaggtttttcgtaatattatattttaacgtttttttttagatattttatattatattattttatttaattttttttataatttttattattttgataagatttatttgtttattgtttttagtatatggaaacgtaagttttatgaggatatagaatttttttattattttatttattgttgtatttttgagtgtttatattagtgttgggtagtaagtaagagttcgataataaatattttttgaatgagggagataggtttgaagtttggagaatgagatgtagaagaggtgtaagatttgttgcgttttttgtaggcggcgggggggcggtgtaggtgttttaagaattatcgcgggattcggtagggggagcgtaggcgtttttcgttaagatagaagcgtttagattataatttttagtagttacgaggagttttagggtttgatgggaacgggaaattttttaattttttacgtttcggtttcgcgggtttcgtgggtcgttcgcgaaatttgattcgggatgcggcggtttaatcggaaggtggatcgaaatttcgcgatagtaagaggttcgtagcgattcgcggtgttaaggaatatagtgtttttaaaagaattggcgttcgttgttcgttttttttttcgggagttttttgtttatttttagaagaggagggaagtataggtgggtttttttagttttgcgtcggatttttgagaatttcgaagttattttggttgaggttaattttcgttgtgttttttttgtagtatgaagattttggagatttaatcgttagtttcggattgttgttttttagattaggatttagttttagtttatttttttttttacgttttttcgatgaataaaaatgcggattttgaattgatgttatcgtttttcgaaaggggggattcgtttcggttgtttttagattttgtggttggtttagttgtgttttaggagttacgggagggggatttagtttttttttttatttttttggaaatagagtttggtttttttagtgagttgagttttcgaatcgaggagtaagaattttttgaaaatataagtttttttgtagaagaagtaaacgggagtttttttgaagaagaagcgaacgggttagagttggggtttggaaaagttatggaagatatttttggggaattcgttgtagaggacgagggagatacgtaagtggtgatggtagtggagtgtggagtttggggagatgaagtgtgaggtcgatttgttttttggttttgagatttatttttttaggtttttgttttttttgtttggcgatttaggtttattgttttttattttttttttagcgtttggaattatagttttttttagttgtttcgattttttagtggtttttggttagagtttagtatttaatttgagaattttttgaaaggttgtaagtggtaaggataataacggggtagggagttgattattttcgagatttttattgtaaaatagtttagttttttaggagagggatgttttagagttgggagaagcggtacgtagtttttttagattgagtttatattttatttagtagtttgtgttttttattttttttaaggatttaggggggtttatttattttagaggtaggtttagttttagttttatatttgaaaagtataggtttggttagttttttaatttttttttgtttttagggtttttgacggtttttgtattttgattaatagtgttgataatattttgcgaatttataatttgtttttagagttgtattatgagggggagtaggtggaatatgtagaaatggtaaggattggggttaattgtttttttattaatgttgtatatttaagtttttcgtggagatggaaaaagtgtagtttaagtgttttttgtttataaacgggattgttttttaagacgagtttttatatgtagcgttttttgtttcgaattttgaagttatttagagagaggttttttttttttttaattaggaatttgtgttttttgttaaaaagtagtgaattttttgtggtagtatatatatatttttattttttatttttttgagataaggttttgttttgttatttaggttggagtgttgtggtgtgatttcggtttattgtaatttttgtttttcgggtttaagcgatttttttgttttagttttataagtagttggtattataggcgtacgttattatattcgattaatttttatagttttagtagagacggggtttcgttatgttgggtaggttgatattaaatttttgattttagaggattcgtttattttggttttttaaagtgcggggattataggtgtgagttatcgtgtttggtttatagttatttattgattgattattgatatatgttagttattgtgttgggataaagtggtggataagatagatgaagggttggtttgttttttgtgtgggagatagataataaatatgtaaattagtaagtattaggattaagatgatgataaatgttttgaaggaaatatatagaatgaagagagattaattagaggaaagtatattgtataaaatggttaggaaggagttttttgaaaaggaggtatttgagttaagatttgaaggaggataagggattagttatgtgaaggtttttggaaagagttttttaggaattggtaatgatattataaatatttagaattgggaaatagttttgtgcgttaaaagattagaaaggttttgtatggtggtttacgtttgtaattttagttatttaggaggtcgaggtgtgtagattatttgaggttaggagttcgagattagtttggttaatatggtaaaattttatcgttattaaaaatattaaaattagacgtatgtggtggtacgcgtttgtaattttagttatttgtgtggttgaggtaggagaattttttaaatttaggaggtggaggttgtagttagataaaattgtattattgtattttagtttgggcgatagagtgagattttattttaaaaaataataaaatagattgggtttagtggtttatatttgtaattttagtattttgggaggttgaggtgggtagattatttgaggttaagagtttgagattagtttggttaatatggtaaaattttatttttataaaaatataaaaattagttgggtgtgatggtgggtgtttgtaattttagttatttgagaggttgaagtagaagaattatttgaatttaggagatggaggttgtagtgagttaagattatgttattgtattttagtttgggtgatagagtgagattttattttaaaataaataaataaataaataaataaataaataaatataaaataaaaaatttagaatgttggtatagttagattgaggtaagtgagggggatagaggggtgaggatagagaagtgtagtt

SEQ ID NO: 2219 - DNA, 6396 bp, Artificial Sequence
  chemically treated genomic DNA (Homo sapiens)
cggtcggtcggtatttagtgttcgtcgtggaagcgaatcgtaggagtattttggggtagcggggagttgttgtatttatttagataggcggtttattgtgattttaggtaagttattttttttttttgtgttttagtttttttgtttgtaaaatgagtagttggattagaaatttattatttttttatagtacgttaaatttaatatgtttatttgagttgaagatattgaggttatttattgggtgtgaatttttgatagtatttaggttttgtatagttgtttaggagaagtttgatttatgatgtttttttcgttatttatttgttacgagttttagttttgagttggaggggtgggggtgggtggaaggtggatagtggttagtgttttatttggtcgattgtagtttggtagagtttatgggggatttcgtagtatagtggatttttttgttttgtgtttttagttggtttagttttggtttattttatgttatttcgttgttatgggtaggattgggtttgatgaagttggatttaggtgtattttagttttttttggtttttgtcgtttttttgtggtgtttagggtttatgtttttatttttttgaatgttgagtttatttcgttttttagggattagggttgtttgagtttagggtggaggtgttgttgtttgtttggttttcgggttttggattggtagtgttttttagtatttttgtttagttatgttaagtttttttttttttttttttggtttttgttttatttgttttgtgattggtttaagagaggggtgtgggttggtaggtgttttatataaagtttggaggtagtatttaggtttggttgatttatttcggggttttttgtttattgtttttagttaagttgggtttttttttttttgtttagttgaggtagggtttagaagggtatcgaggtaggttttttgtgatgtttttgttgttatggtaattttagatgagaaggttatagtattttgtgtttggtattttcgcgtatttttttagttttgttttgttgttttaagagatggttttttgttggggagttcgagagtttggaatttgttgtagttaaagttttttttatgcggttaggtatagtggtttatgtttgtaattttagtattttgggaggtcgaggcgggtggattatttgaggttaggagtttaagattaatttggttaatatggtgaaattttatttttattaaaaatataatatttagtcggaaattatttgaatttaggaggtagatgttgtagtgagttaagattatgttattgtattttagtttgggtaataaagcgagatttcgttttaaaaaaaaaaaaaaagtattttttatgtaggttttattttttggatttttttttaattttaagagagattattattttagtaggtaagattttattttttagaaattgatttttattgtagagttgatagtgggaaagggtttaggatttaaaattaaaagatttagattttagttttaagttatttatagttgtgtgattttggataaggtaggttttgagttttagtgtttttttttgtaaaatgtggataaatatgcgatattgaattattttttaggaatagttttatgatttttcgtaggttgtttttttgatgtgtaatgtttttttattttttttagttttatgaatttttatttatgttttaagatttaatcgaaatgttttattgtttgtaaaaatttttttgatttttgtgtatttggtatagattttaggttttgttattttgtgttagagttgttatttaagtgtttttaaattttttgattatgaatacgtataggtaggaattagattaggtttagttttggaaggagaaatggtttggcgaatattttttttgcggaacggaaagtagaagagggcgattttgattgggttgggtgttatttttgtaggggttaattttgggatttttgttttaggtatggtttgggttaattagtatttatgattttgttgtgtgtttgagtcgtgtttggttaattggggatatttttatagttgagatttagtaggagagattatgatttgtgttagggtgtgtttgttttagttttggggtagggttaggagtagttgtttatgggatgtttttggggatatgttggggtttttgggaggggaagggagattggttatgtattgtttatggttttggtggtatttttgggatattgttaaggagtttgcggtttagggaatagggaggagggattttagtgtttttaatttttttttatggttttatggttgttggtcggggttagggagatgaagtagtgttagtttcgtggtttgtattgattttgattagtgaattaggtttttttagttagagttagttagttaagtacgttttttagtggttattatagggaaggtaagaatttgtttttataaaggtaggatttttatttatttttttagagagtatagaatgagtattaatgttttaggtatggtgttaggtatgtgtgttaattttagttaaaatatatttattggtcgagtgtggcggtttatttttgtaattttattattttgggaggtttaggtgggaggattgtttgaatttagagtttaatattagtttgggtaatgtagtgagattttatttttataaaaaaaaaaaaaaaatagttgggtgtggtggtgtgcgtttgtagttttagcgatttgggaggttgagatgggaggattgtttgagtttgggaagtggaggttgtaatgagttaaaattatatttattgtattttagtttgggtgattttgttttaaaaatatagttatatatttatttatatatttatatgtataaatatatgtgtatatataaatatatttgtaatattatagatatattaatatatatttatatatgttaatatataaatatatataatatatatttattattttttaaatggaaagtttttgagttttaggatgtgttggttgggaagggaatataggatagggaaataatttattaagtaatgatttagtataggttataaaattagaattatttggagaatttgaataattttaatatttggggtttatttagattaattaaattagaattcgtaggggttaggtataggtattagtggtttggagagttgacggatatatgttttatttattatttttattcggttgttaaggtaggtatcgttgttttattttgtatatgaggagattgaggttgaagtgaatttgtttttttttttatattagttgaggatagcgatggggtagcggggaggtagtaaatatttttataaggttgtttttaaagagagttttataataataatagttttattgtttgttatgattagaaaagtatttaaggttattgcgaaatagtttttttttttttaggtagataattatataaaggtaaaaatggtgtgtgggggtgggggataaggggagggagagtattaggataaatatttaatgtacgtaaggtttaaaatttagatgatgggttgataggtgtagtaaattattatggtatacgtatatttatgtaataaatttgtatattatgtatatttatgtaataaatttgtatattttgtatacgtattttagaatttaaagtgaaaaaaaaagtggtgtgtagaaaaattatttgtaattttagtatagttaacgtttagtatattttagagagagagggtgataggaaagggaggatgagagtgggtttaagatataaggttatattataaaattagggtttttggaagtttagttttaaaattatatattttataattttttgtagtgtttgattaaaatgtaatatttttaaggttatagatttagattttggagaaagatttagaaaattgttcgtttaataaatatttgggcgatttttacggtttttaaagattaagaattattgttgtttagagttttgttttttttattgaataatataagaggagtgtgtaggtagatatttattatttttaatagtttaggagagtttttgagtatggattgatgtattaaaatttattgaattatatgttgagatttttattagttgttcgtggggatttgggtatttatttttatattgtattggttggttggaagttagtagtataaattttagggttgttttgttaatttttattagatttatttttttttattagtttcggtaggtttttttttttatttttttgaagtaatttattgatgggttttgttagttaattatagttagaataacgtatgatgttattagtagttaattagagtttttcgttagtatatgtagaattttgttattttattagggtgatgaaatttttaagtaatattattttttttagataagggtattgaggttgagagaggagttgaaatttattcggggttattatatataggtggtaaggttgggattagaaattaggattgttgattgtagttcggtatttattttttttatagtttatagggttgttaaagattttagggtttagttagaggttttttttttttggagagtttttggtatagaagttgaagtttagtatagttttttaatttttaattttttttgtaaggttttaggggttagaatattggtggagtagattttttagtttttggattttagggttatggtagagggggtgttgttttaaattttagttttggttttagtttaatattttttaagaagaaattagaggggttatggttaggttgtgttagtcgttgtttttgagtagattataagaagggattaagataaggatttttttgtggaggttttggtttagggagttaagtgacggcggtttagtatttacgtgggtagtgttagtttttaagagtgggtaggggtattggttatagagttttagggagttttattagtttagtcgttagattttttgtgggattatcggatttatttggaattttatttgtgagtataaggtgttttaggtggattgggttggggttttgaggtttttagggttggatggttattttgcgtatttgtgtgggatatgtatatataggtagtatatgcgtaggtgtgtgggtatttgtgtgtttgtgtaaatgttttgaggtgggaatgagtttggtgtgtattaggtatagttagttagtgtggttgtagtaaaatatatagggaaagaatggagggggtattaattattgttttagtaaatttttattgagcgttttttacgagaatataagaggagtttttattttgaggaggaaataggtaggaaataggtagatattttgtataattttaagtagtgataagtgttttttagaaatattaagtaaggtgaggagatatagagtatcggtggtagtggggttttatttttaggttggatggttgggaatattttttttaaagggaatttggagtgggaaggaattatgtaggtattttaggaagagttttttttaggtaggaagattagtaggtggaaaggttttggagttattatttagtaaatattatttgagtatttttattagttaggttttattatgggaatgggaatatggtggtggatagggttgtttggttttttttatattttttatattagggtggttgagagagtttgggagttaacgaataagatgggttgagaatattgtttagtttagaggatttgagtttagtgtgtagatattgttgttgttattgtttttgttattgtattatttatttatttatttatttatttttagatagagttttgttttttttatttaggttggagtgtaatggcgtgattttagtttattgtaatttttattttttgggtttaagcgatttttttgttttagttttttgagtagttgggattataggtattcgtattacgtttggataatttttttgtatttttagtagagatagggttttattatgttggttaggttggtttcgaatttttgattttaggtgatttatttgtttcgattttttaaagtgttgggattataggtatgagttattgcgtttagtgattatagaaagttaaaggtatatggtaatgtatacgtttatttacgttttttttgttaaagtaaagggtagtttttgggtttatttttttgcgtttttatttttaaaaggtagttagaattggtagggttttggagattattttatttattttttagggtttttatgggagagttgaggtttagagtagggaagggttttgataggttttgattagggtttttgatttttataaatttttaatcggtgtttttttttattagg

SEQ ID NO: 2220 - DNA, 6396 bp, Artificial Sequence
  chemically treated genomic DNA (Homo sapiens)
tttggtagagagggatatcgattgggggtttgtagggattagaggttttggttagagtttgttaggatttttttttgttttggattttaatttttttatagggattttaggaggtggatgaagtggtttttaaggttttgttagttttgattgttttttggaagtagaaacgtaagaaagtgagtttagaggttgttttttgttttggtagggaagacgtagataggcgtgtgtattgttatgtgtttttaattttttataattattgggcgtagtggtttatgtttataattttagtattttgggaagtcgaggtaggtggattatttaaggttaggagttcgagattagtttggttaatatggtgaaattttgtttttattaaaaatataaaaaaattatttaggcgtggtgcgggtgtttgtaattttagttatttaggaggttgaggtaggagaatcgtttgaatttaggaggtggaggttgtagtgagttgagattacgttattgtattttagtttgggtaagaagagtaaaattttgtttaaaaataaataaataaataaataaataatataatgataaaggtagtaatagtagtaatgtttatatattaagtttaggttttttgggttaggtagtgtttttagtttattttgttcgttagtttttaagtttttttaattattttagtgtgagaagtatggaagggattaggtagttttgtttattattatatttttatttttataatggaatttagttggtagagatgtttaaatgatgtttattgaatggtggttttagggtttttttatttgttgatttttttgtttggaggaagttttttttgagatatttgtatggtttttttttattttaggttttttttagaaaggatgtttttaattatttaatttggaaatagagttttattgttatcggtgttttgtgtttttttattttgtttgatatttttagagagtatttattattatttgaaattatataggatatttgtttgttttttgtttgttttttttttagaatggaagttttttttgtgttttcgtagaaggcgtttaataaaaatttattgaagtagtgattgatgttttttttattttttttttgtgtgttttgttgtagttatattggttggttgtgtttgatgtatattaagtttatttttattttagggtatttgtatagatatataggtgtttatatatttgcgtatgtgttgtttgtgtgtgtatattttatataaatacgtaagatggttatttaattttgaaggttttaaagttttagtttagtttatttggggtattttgtatttataggtggggttttaggtgggttcgatgattttatagaaggtttggcgattaggttggtgggattttttgggattttgtggttagtgtttttgtttatttttagaggttggtattgtttacgtgagtgttgagtcgtcgttatttgattttttaagttaggatttttataaaggagtttttgttttagtttttttttgtaatttgtttagaagtaacggttagtatagtttggttatggtttttttaatttttttttggagggtgttgggttgagattagggttggaatttagggtaatattttttttattatggttttaaaatttagaggttaaaggatttgttttattagtgttttgatttttgaggttttgtagagagagttgggggttagggggttgtgttgagttttaatttttgtgttaggaattttttaggaaggaggagtttttgattaggttttggggtttttgatagttttgtgggttatggaaagaatgaatatcgggttgtagttaatagttttggtttttggttttagttttgttatttgtgtgtggtgatttcgggtaggttttagttttttttttagttttagtgtttttatttgaaaaggatggtgttgtttgggaattttattattttagtaaaatgatagaattttgtatatgttgacgaggagttttgattggttgttggtgatattatacgttattttggttgtgattggttggtagggtttattagtaagttgttttagagagatggaaggagaagtttgtcggggttggtggaggggggtgagtttggtgggggttgatagaatagttttggagtttatgttgttggtttttagttagttagtgtaatatgggaataaatgtttagatttttacgggtagttggtgaaaattttagtatgtgatttaataaattttaatatattaatttatatttaagggtttttttaagttgttggaagtggtgggtgtttatttatatattttttttgtattgtttaatgaagagagtagagttttaggtagtagtggtttttggtttttagaggtcgtaagaatcgtttaaatgtttattaaacgggtagttttttggatttttttttagagtttgagtttgtggttttagggatgttgtattttaattaagtattgtaggggattatgagatgtgtggttttgggattaaatttttagaagttttgattttataatatgattttgtgttttaaatttatttttatttttttttttttgttattttttttttttgaaatgtattaagcgttaattatgttgagattgtaggtgatttttttatatattatttttttttttattttaagttttgggatacgtgtgtagaatgtataggtttgttatataggtatatatgatgtgtaggtttgttatataggtatacgtgtgttatggtggtttgttgtatttgttaatttattatttaggttttaagttttgcgtgtattaggtatttgttttaatgttttttttttttttgttttttatttttatatattatttttgtttttatataattatttgtttagaaaaaaaaaaattatttcgtaatgattttgaatatttttttaattatggtaaataataaagttgttgttattataagattttttttagaggtagttttgtaggagtatttattgttttttcgttgttttatcgttgtttttaattgatatggggaaagaagtaggtttattttagttttagtttttttatatgtaaaatgggataacgatgtttattttggtagtcgaatgagaatgatggatgggatatgtgttcgttaattttttaaattattggtgtttgtgtttgatttttacgaattttgatttgattggtttggatggattttaggtgttgggattgtttaagttttttaggtgattttgattttatggtttgtgttgagttattgtttaatggattatttttttattttgtattttttttttaattaatatattttgaaatttaagagttttttatttagaagatgataaatatatattatatatatttatatattaatatatgtaaatatgtattaatatgtttataatattataaatatatttgtatgtatatatatatttatatatataaatatataagtaaatatataattatatttttgagataaggttatttaggttggagtgtaatgggtgtgattttggtttattgtaatttttattttttaggtttaagtaatttttttattttagttttttaagtcgttgggattatagacgtatattattatatttagttattttttttttttttttatagagatagggttttattatattatttaggttggtattgagttttaagtttaagtagtttttttatttaggttttttaaagtggtgggattataggagtgagtcgttatattcggttaataagtatgttttaattaaagttaatatatatgtttggtattatgtttggaatattgatgtttattttgtattttttgaaggaataaatgaaaattttgtttttgtggagataagtttttgttttttttgtggtggttattagagagcgtgtttgattagttggttttggttggggaagtttggtttattggttaggattagtgtagattacggagttggtattgttttatttttttgatttcgattagtagttatagagttatgagagggagttggagatattagagttttttttttttgttttttgaatcgtaggttttttggtaatattttaggagtattattaggattatagatagtgtatggttagttttttttttttttttagaggttttagtatgtttttagagatattttatgagtagttgtttttggttttgttttagagttgagataggtatattttggtataagttatggttttttttattgggttttagttatgaaaatgtttttagttagttaggtacggtttaggtatatagtaaagttatgagtgttgattgatttaagttatgtttggaataagagttttaggattgatttttgtagagatggtatttaatttagttaaggtcgtttttttttgtttttcgtttcgtaaagaaaatattcgttaaattatttttttttttagaattgagtttaatttgatttttgtttgtacgtatttatagttaaaaaatttggaaatatttaaataataattttaatatagaatggtaaggtttaagatttgtgttaagtgtatagaggttagggaaatttttatagataatggggtatttcggttgggttttgaagtatgagtaggagtttatggagttgagaagaatggaagagtattatatattaggggaataatttacggaaagttatagagttatttttgaaggatgatttagtatcgtatgtttatttatattttataaaggaggatattgaagtttaaggtttgttttgtttaaggttatatagttataaatggtttgagattaggatttaggttttttgattttggattttgagtttttttttattattagttttatagtaaaggttagtttttgagaggtagagttttatttgttagggtagtggttttttttggggttgaagggaggtttaaaggatggggtttgtatgaaagatattttttttttttttttgagacggagtttcgttttgttatttaggttggagtgtagtggtatgattttggtttattgtaatatttgttttttgggtttaagtgattttcggttaagtattgtatttttagtagagatggggttttattatgttggttaggttggttttgaatttttgattttaagtaatttattcgtttcggttttttaaagtgttaggattgtaggtatgagttattgtgtttggtcgtatggaagaaattttgattgtagtagattttaagttttcgagttttttagtagagagttattttttggggtagtagggtagagttggggagatgcgcgggggtgttagatatagaatgttatggtttttttatttagaattattatagtaataggagtattatagagggtttgtttcggtgtttttttaggttttgttttagttgggtaggaagaaggagatttagtttggttgggggtagtaggtagggggtttcggggtaagttagttaggtttggatgttgtttttaggttttatgtgggatatttgttagtttatattttttttttgggttagttatagaataaatagggtagaggttaagaaagaaaaggagggggtttggtatagttggataggggtgttgggggatattgttagtttagggttcggaagttagatagataatagtatttttattttgagtttaggtagttttgatttttgaaggacggagtaaatttaatatttaaagagatagaaatataagttttgggtattatagaaagacgatagaaattaggagaggttgggatatatttaggtttaattttattaaatttagttttgtttatgataacggaatagtatggaatagattagagttggattaattagagatataaggtaagaggatttattgtgttgcgaggttttttatggattttgttaggttgtagtcggttaggtgaggtattgattattatttattttttatttatttttatttttttagtttagaattggggttcgtggtaggtgggtagcggaaaggatattatgggttaggttttttttagataattgtgtagggtttggatgttgttaaaggtttatatttagtgagtagttttagtgtttttagtttaaatgggtatgttgagtttgacgtgttgtgaaagaatggtaagtttttagtttagttgtttattttgtagataaagaaattgaggtatagagaaggaaaatgatttgtttgaagttatagtaggtcgtttgtttaggtgagtgtagtaatttttcgttgttttaggatgtttttgcggttcgtttttacggcgagtattgaatgtcgatcgatcg

SEQ ID NO: 2221 - DNA, 6475 bp, Artificial Sequence
  chemically treated genomic DNA (Homo sapiens)
  unsure 3346, 3351, 3354, 3357, 3366: n is a or g or c or t
ttttttttttttttacggtttttgtgtgtttatattttaggattgttttttgaatattgttggattgtgtgtttttttaaagaaatttaatttgataatttttatttttttattattgattattgatttgtttgaattttttgtattgttgtatttatattttatattatttgttttgttttttttattttttttttagattaatttagtttttaaaaattttttgttttttttcgataggtttggaaaatatatatttaattttatttttttagtagttttttttaaaattttattatgtagtatagttttaattaagtttaaagtgattatgatttgttttttttttttgagttatgtaaggattttaatatatttttatttttgttttatatgttattgttatttggtattttggttttaatttttaataattttttaatttattattattattgttattgttttatataatgattgtttgtttatatttatttttagatttattattttatttatttatttttttttggtattttgtttttaggttgaatttttttttttttggtagggcgaggtggtttatatttgtaattttagtattttgagaggtcgaagtaggaagattgtttgagtttaggagttttaggagtttgagattagtttaggtaatatggtaaaattttgtttttataaaaaaatataaaaattagttaggtatggtggtatatgtttatagttttagttattagggaggttgaggtgggaggatcgtttgagtttagaaggtttaggttgtagtgagttgtgattgtgttattgcgttttattttgggtgatagagattttgttttagaaataataataaaaaatgttttttttttttgaaattttttttttagtagtttttttagaaaggattgttaatgttaagtttattttgtttttttaaaaaaaaaaaaaaaaaaaaagtttatgtttttttaattttgaataataatttataggtagattagatgttatagtttttttgttacggttttttaattttattttttcgttttttttagattattagtgtttgttttttcgtgtttgagggttagaagtgttgagggttgaatgttttttgaagtagttttgataataattgataggaaggagtaagtgtagaaatttttttgttttttgatttaagagtgggaagatttagaggtatggattttatatttttttagatttttttttagaaggaagtttttttgtttatttggtggttggtataataaatattttttattgattgttttttttgtttcgtattatatttttatttttttgtcgatgttttttgtttttttaaattaattatttatattaaaatatttagggtttgtttttgggattttaaattaagatattgtatatagaattttttataaatggatttttttttttagtatttttttttggattttttaattttattatgttttttaattttgtttttatttttttttttgtggttttttttttttgagatggagttttattttgttatttaggttaaagtgtagtggtgtgattttggtttattgtaatttttgttttttgggtttaagtaatttttttgttttagttttttgaatagttggaattataggtatgtattattatgtaaggttaatagttgtatttttagtagagatgggattttaatacgttggttaggttggtttcgaatttttgattataagtgatttgttttatttgggtttttaaagtgttgggattataggtataagttattgtgtttggttgtttttttatttttttatttttatatttgagtgatttttttagaattattttttagtttttttttttttaaaaatatttggtgtttttgaattttttaattaatttattatatatattttttaaagttttttttttttttttttgggatagtattttattttattggttaggttggagtgcgcgattatggtttattgtaattttaattttttgggtttaaggggtttttttttttattttagttttttgagtagttgtgattataggtatgtatcgttaggtttagttaattttttatttttattttttgtagagatggggttttgttgtgttgtgtaggttagttttaaattattgagtatagataatttttttgtttttgttttttaaagtgttaggattataggtgtgagtttttacgtttggttttaaagtttttttttaagttttttttttgtttttttttttttttttttttttaacggatttttattcggttattaggttggagtgttgtggtatgattttggtttattgtagttttcgtttttcgggtttaagcgatttttttgttttagtttttagagtagttgggattataggtgcgtgttattatgtttagttgatttttgtatttttagtagagatggggttttattatattggttaggatggttttgatttgttgattttgtgatttatttatcgtgagttatcgtgttttgttttgaaaaaagtttattttttgtaaagatagggttttgttgtgttgtttaggttggttttgaatttttggttttaagcgattattttattttagttttttaaagtgttaggattatagatatgaattatcgtgtttagtttttattataattttaaataatttatttttttttttttattttttttttgaagattttaataatttgaaatttttagggatttaatttttgtttatggtagattgtttttttaagtgttgaaaaatttgtgattttgaatttatcgttaagagagttttatttgtatgagtgtaaaggatgaaaattttagattgggcgtggtggtttacgtttgtaattttagtacgatagttattttttttttagtagttgtttattggtattagttatttattttagtaggtattagtttagtagatggtgtcgagtattaggtttttgggtatgggaggtttggtagaataattgtgtgtttttgtgtttgtgtgtgtttatgtatgtgtattttatgacgtcgtgatatatatgttgtagtgtgtttttgttgtattattgttattaggttttacggatagtacgagttttagttttaaattattattttttatttttattattttataaaggtatatgtttgtcgtcgagatttttatttataatcgatttatttaattttggttacgatttatatggattgtgtgtgatatggttattagggtatttattatagttggggtgtttttaagatttacggtagttacgggattaataaaaggggnaatantanggntagattttnttatggattgtaaatttttgtaatgtgcggtttttagtttggagggtttttagattggtttacgttaggttatttatgggtttattttgttttatgtttatttaggttttttttttttattgattttttaagatattttttattttttttttagattaattgtggatttaaagaatatttgttgtatttagtatagtatttaaagatattttgtaatgaaagggtttttagattagttatttagtttttttaaataagagttggaagtggaaatttcgatggttttttttttttttttttttttttttttgagacggagttttgttttgttatttaggttggagtgtagtggttcgattttagtttattgtaagtttcgtttttcgggtttacgttatttttttgttttagtttttcgagtagttgggattataggcgttcgttattacgtttggttaattttttgtgtttttagtagagacggggttttattatgttagttaggatggttttgattttttgatttcgtgattcgtttatttcggttttttaaagtgttgggattataggcgtgaattatcgtgttcggttttttaatggttttttttattgttttatgttgattttgtttttggtgttattttttttttttgggagtgtgtattttttttttttggggcggtaaagggagtagtagagtgcgaggtatgtgggaagggaggaggttggaatttagtggttttttaaagttttagggtaggaggtattatggagaagtagtgaggaggttttttatatttagatatgttttagggtgtttgttttagtgtttggaattttagtacgagagttattttttttttatcgttgtttattgtattagttatttattttagtaggaattagtttagtagatggtgttgagaattaggtttttgggaatgggaggttgggaagaagaattgtgtgtgtgtgtgtgtgtgtgtgtgtgtgtgtgtgtgtgtaagattagggtattagaagtgggtggaaatgtttttgagaattagaattattagaatgtagtaatagtagaagtattagatttaaattattattttttatttttattattttataaaggtttaggtttgtggttaagatttttatttttagtcgatttatttaattttggttaggatttaaatggattgtttttgttagggttaggatcggattttttatatttggggtgtataggaagtgttagtatttttttttttttaaatatagtagtaaaattggtttaggttgaggtgttttttttaatttttttggagtttagttttggaagttggattaggaagttgtgttgttttattgtgattttttttggtttgtattagtttgttttgaaataattagtatttttggttattttatataggtggggtattttaggaagattagggattaagtgtgggggtgtagggatagggggtgtttggggagggtaaggtagttaattaaggtagttgttaggaggtttttttttaaattttataaagttttattagtttggaggtatttttaatattatttttttttattgtttttttttggtaattaaaaggaggttaattttttgttgtggtagtttatagttattgtggtgggaaagggagggtggttggtggatgttatagtttgggttttattttttttagtagtggggattttatagtttttgggttatataatagtaagatagttcggagttgtagtagatttgattgagtttttgtagtagttgagagtatggtttagggtgggcggtattattgtttagtagttgagttttttagggattttggagatagtcgtagtttttatttgtaggggaaggtatggtttttggaaggagagttggtttagttgtgggaggaagatgtaggattgattgatttttgtttttggggagttggagttttttgtcgttggattagaagggttttgtttggaggggtaatttaatttagttagggatgattttaatatttttttttttatttgtttttgagggttttggggttgtttttttttatgtagtgggttttattgtttgatagtattttatttaaatgagttggaatgaagtttgtttttatttttgagaatttgggagtagttgaatgtatttgcgtgttaggattgggaggggatatttgtttggagatcgagatttggtagtatttgatattttagtgttttttttatagatgtattatagattggtttgattttatttttggttggatgggattttaggtaggaagggagttatttttagtgaattttaggtagtagattttgtattttatttaataatttttttcgaggagaggggttatagtaggggttttaagtgatttggggtacgttttgttagttaggatgaattgttttttttttgggggttatatagtggggaagtttgtttgtatttagggtcgttggatttttgtttatttttttagatgaatttagtaaatatttgttgggtattttttgggtgttaagtattttgttaggtgttggggttggaggtaagggagatagtttttgtttttgtgaaggtatttgtggtatagagttaggggttaataagtaaatcgttaagttggtggtttttgagtattttttatgtttgggttgttgtggtgggtatataagtgtaagacggtttttattcgttagtttggatgtagaggtaggaaggaatgaggtgtgtgttagtttttagttgttttaggaggtagggatgtgaggtttagcgggtttggagggaaggtagcgttttttttttgttttgggtttgggattgttgtttgtggaaaggtgtttataggttttagtttatagcgattgttatttttgggtttggtattggttaggggttttttcgggggttagaagtttatgtttaaaggggaaaagggggttacgaggattaatttttttttttgttttaaagaaatgtttttgttattgtatgttttgatagtcgttatattagtagtcgtttatttgggtagtaatgattagtttacgttttttgtttttttgtaga

SEQ ID NO: 2222 - DNA, 6475 bp, Artificial Sequence
  chemically treated genomic DNA (Homo sapiens)
  unsure 3110, 3119, 3122, 3125, 3130: n is a or g or c or t
tttgtaaagaagtaagagacgtgagttggttattgttgtttaggtaggcggttgttggtgtggcgattattagggtatgtagtagtaaaaatatttttttaaagtaggagaaaagattgattttcgtgattttttttttttttttgaatatggatttttggttttcgaaaaaatttttggttagtgttaggtttaagggtaataatcgttgtgagttgggatttgtgggtatttttttatagatagtagttttaggtttaagataggaggaaaacgttgttttttttttaggttcgttgggttttatatttttgttttttgaagtagttgggagttaatatatattttatttttttttgtttttgtatttaaattggcgagtaggaatcgttttatatttgtgtgtttattatagtagtttagatatagagaatgtttaggaattattaatttgacggtttgtttgttggtttttgattttgtattataagtgtttttataagagtaaaggttgttttttttgtttttaattttagtatttggtaagatgtttagtatttaggagatgtttagtaaatgtttgttgagtttatttgaaaaaatggataggagtttagcggttttggatgtaggtagatttttttattgtgtgatttttaagagagggataatttattttggttggtagagcgtattttaagttatttagagtttttgttgtagttttttttttcgggaaaagttgttaaatgaagtgtagaatttgttgtttgagatttattgggggtgattttttttttatttaaggttttatttagttaaaggtgaaattaagttaatttgtgatatatttgtggaaggaatattgagatgttagatattgttaggtttcggtttttaagtaggtgtttttttttagttttaatacgtaggtatatttagttgtttttaggtttttagaggtgagggtaaattttattttaatttatttgagtgaagtattattaaatagtaaaatttattgtatgaagaaaagtagttttaggatttttagaggtaagtggaggagggagtattaggattatttttggttgaattgaattgtttttttaaataaagtttttttagtttagcgatagagaattttagttttttaggagtagggattagttagttttgtattttttttttataattgagttagttttttttttaaaggttatatttttttttgtaaatgagggttgcggttatttttaaggtttttgggaaatttagttgttggataatggtgtcgtttattttaggttatgtttttagttgttgtaaaggtttaattaggtttgttatagtttcggattgttttgttgttatgtagtttaggggttgtggagtttttattgttgggggagataaagtttaagttgtgatatttattaattatttttttttttttattataatagttgtgagttgttataataggggattggtttttttttaattattaaaaggaaataatgaaaggaaatggtattagaagtatttttaagttgataaagttttgtagagtttggagggagattttttggtagttgttttaattaattgttttgttttttttaaatattttttatttttatatttttatatttgatttttggtttttttagagtgttttatttgtgtgggataattaggaatgttggttgttttagggtaagttgatataggttagggggaattatagtagaataatatagttttttgatttagtttttagggttggattttagggaagttgagaaaaatattttaatttgagttaattttgttgttgtgtttggaggaaggggagtattaatattttttatgtattttaggtatgaaggattcggttttggttttgataaaaatagtttatttggattttggttagggttgaatggatcggttaaagatgaaggttttggttataagtttaagtttttgtaaaatggtgaaggtggggagtgatggtttgagtttaatatttttattgttgttatattttaataattttaatttttaaggatatttttatttatttttggtattttgattttatatatatatatatatatatatatatatatatatatatataatttttttttttagttttttatttttaaaagtttaatttttaatattatttgttaaattaatttttattaaaataagtaattgatgtaatgggtagcggtggggggaagatgattttcgtgttgggattttaggtattgagataagtattttgaggtatgtttgggtatggaagatttttttattgtttttttatgatattttttgttttaagattttgagaaattattaggttttaattttttttttttttatatatttcgtattttgttattttttttatcgttttaggagaggaagatgtatatttttaaggaagaaaaatggtattagaggtagaattagtatgagatagtagaaaaggttattggggggtcgggtacggtggtttacgtttgtaattttagtattttgggaggtcgaggtgggcggattacgaggttaagggattaagattattttggttaatatagtgaaatttcgtttttattaaaaatataaaaaattagttaggcgtggtggcgggcgtttgtagttttagttattcgggaggttgaggtaggagaatggcgtgaattcgggaggcggagtttgtagtgagttgagatcgagttattgtattttagtttgggtgatagagtaagatttcgttttaagaaaaaaaagaaaagaaaagaaaaggttatcgggatttttatttttagtttttatttaaaaaaattaaataattaatttgaaaatttttttattataaaatatttttaaatgttgtgttaaatataataaatgttttttaaatttatagttgatttgggaggaaagtaaggaatattttaaagggttaatgaggaagaggagtttaaatgagtatgaggtagggtaggtttatgggtggtttagcgtaggttagtttgggaattttttagattggaggtcgtatattataagaatttgtaatttataanggggtttanttntantgttnttttttttgttagtttcgtgattgtcgtaaattttaaaggtattttagttatgatagatattttggtaattatgttatatatagtttatatggatcgtgattagggttgaatgaatcggttatagatgaagatttcggcgataagtatatgtttttgtaaaatggtgaagatggggagtgatagtttgagattgagattcgtattgttcgtagagtttgatagtagtgatgtaataagggtatattgtaatatatgtgttacggcgttatgagatatatatatatagatatatatagatatagagatatataattattttattaagttttttatatttaaaagtttaatattcgatattatttgttaaattaatatttattaaaataagtaattgatgttaatgggtagttgttggggggaagatgattatcgtgttgggattataggcgtgagttattacgtttagtttagaatttttattttttgtatttatgtaaataaagtttttttgacgatgaatttaaaattataaattttttaatatttgagaaaataatttattatgagtaagaattaaatttttaagaattttagattattaaagtttttagaggaaggataaaaagaaaaaaatgagttgtttaaaattataatagaggttaggtacggtggtttatgtttataattttggtattttgggaggttgagatgggataatcgtttgagattaggagtttaagattagtttgggtaatatagtaagattttgtttttataaagaataaattttttttaaggtagggtacggtggtttacggtgggtggattataaggttaatagattaagattattttggttaatatggtgaaattttatttttattaaaaatataaaaattagttgggtatggtggtacgtatttgtagttttagttattttggaggttgaggtaggagaatcgtttgaattcgggaagcggaggttgtagtgagttaagattatgttatagtattttagtttggtgatcgagtgagagttcgttaaaaaaaaaaaaaaaagaaagaataggaggaaaatttgaaaaagaattttaaggttagacgtggaggtttatatttgtaattttaatattttgggaggtagaggtaagaggattgtttgtgtttagtaatttgagattagtttatataatatagtaagattttatttttataaaaaataaaaataaaaaattagttgggtttggcggtgtatgtttgtggttatagttatttaggaggttgaggtaggagggaggattttttgagtttaggaggttgaggttgtagtgagttataatcgcgtattttagtttagttaatagagtgagatattgttttaaaaaaaaaaaaaaagaattttaagaaatgtatatagtaaattaattgaaaaatttaaaaatattagatatttttgggaaaaaaaaagttgaaaaatggttttaaagaaattatttaaatatagagatgaaaaaatggaagagtagttaggtatagtggtttatgtttgtaattttagtattttgggagtttaagtaaggtagattatttgtggttaggagttcgagattagtttggttaacgtgttgaaattttatttttattaaaaatataattattagttttgtatggtggtgtatgtttgtaattttagttatttaagaggttggggtaggaggattgtttgaatttaggaggtagaggttgtagtgagttaagattatattattgtattttggtttgggtgatagagtgagattttattttaaaaaaaaaaaattataaaaaaaaaaatggaggtagaattaagaaatatgatagaattagaagatttaaagagaagtgttgagagaagaagtttatttgtggagaattttatatgtagtgttttagtttgaagttttagaagtagattttgagtattttagtgtagataattgatttgggaggataggaagtatcggtagggaagtgggaatgtgatacggggtagggaaagtagttaataaaagatgtttattatgttagttattaagtggataagaaagtttttttttggagggaagtttgggaaaatgtaagatttatgtttttgaatttttttatttttgggttagggagtaggagagtttttatatttatttttttttgttagttattgttaaggttgttttaggaggtatttagtttttaatatttttggtttttaggtacggaggagtagatattggtagtttagaagaaacggagagatggggttagagggtcgtggtagagggattgtaatatttggtttatttgtaaattattgtttagagttgaggaaatatagattttttttttttttttttttttggaaaaatagagtgggtttaatattaatagttttttttgaagaaattattaaagaaggaattttagggagaaaaaatattttttgttattgtttttgagatagggtttttgttatttagggtggagcgtagtgatatagttataatttattgtagtttaaattttttgggtttaagcgatttttttattttagtttttttagtagttgggattatgggtatgtattattatatttggttaatttttgtatttttttgtagagatagggttttgttatgttatttaggttggttttaaatttttagagtttttgggtttaagtagtttttttgtttcggttttttaaagtgttgggattataggtgtgagttatttcgttttgttaggaagaagaaaatttagtttagaaataggatgttaagaaaaggtaaataaataaaatagtaaatttgggggtaaatatgagtaggtagttattatataaaataataataatggtaatgataagttggagagttattaaaaattagaattaaaatattagatagtaatgatatgtaagataggagtgaaagtgtattaaggtttttgtatggtttagaaggaagaaataggttatgattattttagatttagttaaggttatattgtatagtaagattttaagggaggttattgaaagaatagaattgaatgtatgttttttaaatttatcgaaaaaaaataagaaatttttaaaaattagattgatttaggagaaaaatggaaaaagtaagataaatagtataaaatgtaaatgtaatagtataaaaaatttaaatagattaataattaataataaaaaggtagagattattaaattggatttttttaaaaaggtatataatttagtaatgtttaagagatagttttaaaatataaatatataaagatcgtaaggaaaagaaagg

SEQ ID NO: 2223 - DNA, 1286 bp, Artificial Sequence
  chemically treated genomic DNA (Homo sapiens)
ataatgaagaataagggtagcgtttgaggttagaagtttttatttacggggtcgaatacgaatgattttttttaattttttttttttttttaatttagatggatgttatatttttgtttaataataaaaaaagatttttcgtttcgtaaaatttatattgattattttttttaataaaataaaattaaaaataaataaaaatataagaaagaaataaaatttaagtttagaattttgtttttaagaagaagtaaatgggttggtcgtttttttgttaggttttgcgttttgtttttttggttcgttttaaagatagaaattttaggttgttcgtgtttgtttttgacgttgggggttaaaaaatgaggttttgttgttttaataagtaaagaaaattttattttttttaagttttattcgtttttatttttttttagaaacgtttgttttatttttttaaatcgagagaaaaaacgaaatgcggataaaaacgtattttagtagtagttttttatacgatattttcgggaggtttgcggggtcggatgatttaagtttacggggacgagtaggagcgttttcgatttttttagagttttagcgttttaggatttatttttttttgattttgtatcgttttttttttggttttagatttttttttttattgtttacgaagtttaggtggtcgtcggtcggggagcggagggggcgcgtggggtgtaggcggcgttaagggcgttgtatttgtgggcgcggggcgcgagggtttttttcggcgcgagcgggcgtagtttttcggcggcgtcgttaggggtttttttcgggtgtcgagcggggtgggtcggattagttgattcgtttggttttgagtttcgtcgtcgcgttcgggtttcgttagttttttcggtagcggtaggcgagagtacgcggaggagcgtgcgcgggggtttcgggagacggcggcggtggcggcgcgggtagagtaaggacgcggcggattttattcgtatagtagcgtattcggtgtttcgcgtagggtcgcgatgttgttcggtttggtattgtttttgttggtcgtttggacggttcgggcgttggaggtgggtgtcggcgtttcggaaggcggggggaggttgtacggtggggacgcgatattttttaagattttaatttaagtttttaatgtagagaagtcgggggttcgttaatgggatttttttttttttcgttttcgtttgcgacgtttagcgtattttcgttttcggtttagttttttttaggga

SEQ ID NO: 2224 - DNA, 1286 bp, Artificial Sequence
  chemically treated genomic DNA (Homo sapiens)
tttttggggagggttgggtcgaaagcggggatgcgttggacgtcgtaagcgggggcggagaggagaggggttttattgacggattttcggtttttttgtattaaagatttgggttaaggttttggggggtatcgcgtttttatcgtgtagttttttttcgtttttcgaggcgtcggtatttatttttagcgttcgagtcgtttaggcggttagtaggagtagtgttaaatcgggtagtatcgcgattttgcgcggggtatcgagtgcgttgttgtgcgagtgggattcgtcgcgtttttgttttgttcgcgtcgttatcgtcgtcgtttttcggggttttcgcgtacgttttttcgcgtgttttcgtttatcgttgtcgaggaaattgacggagttcgagcgcggcggcggggtttagagttaggcgagttagttgattcggtttatttcgttcggtattcgagagagatttttagcggcgtcgtcggggaattgcgttcgttcgcgtcgggaggggttttcgcgtttcgcgtttataggtgtagcgtttttggcgtcgtttgtattttacgcgtttttttcgtttttcggtcgacggttatttgggtttcgtgaatagtgggagggagagtttggggttaggagagggacggtgtaggattagggaaaggtgagttttaggacgttgaggttttagaaaagtcgagagcgtttttgttcgttttcgtgagtttgaattattcgatttcgtaggtttttcgggggtgtcgtataaaggattgttgttagggtgcgtttttattcgtatttcgttttttttttcggtttggagaggtggggtaggcgtttttggaagagaatgagaacgagtgaagtttaaaggaaataggattttttttgtttgttgagatagtaaaattttattttttaatttttaacgttaaaagtaggtacgagtaatttggaatttttatttttagaacgaattaaaggagtaaggcgtaggatttggtaaagaagcggttaatttatttatttttttttgaaagtagggttttgggtttgggttttgttttttttttatatttttgtttgtttttggttttgttttgttaaagggggtggttagtgtggattttgcggggcggggggtttttttttgttgttaagtagggatgtaatatttatttgagttggggaagaaggaaaaattaggagagattattcgtattcgatttcgtaaatgaggatttttgattttaaacgttgtttttgttttttattgt

SEQ ID NO: 2225 - DNA, 681 bp, Artificial Sequence
  chemically treated genomic DNA (Homo sapiens)
tttttttaggggaaattaacgtttgtagtttaatttttttttaatttagaagggagtgaagataagaatatgtatagggaaaatgaagagaggggagcgtgatattgagttggaggaggtaagagagtattatgagagataagatggggttgatagatttagtagatataatatttgggatatacgtacgaagaaatgattcgttgtttatgtaaaattgaaatttaattaggtaggtattttgtattttatttggtaattttaggaaaagagaaaaatatagtgttattttaatattttcggttgtgtaaggaaaataattaaagttcggttttaaggaaaaataaataaaagaggttgtgcgaatgtattcgaatttttaaatagaatttattttcggtttggggttttgggaaaataagaagaggagagataattaaggtagtcgaatttagttcgttagtgttttataatttttttttttcggttttttttttttcgtttaagatggcgttgttcgcgatgtatttttggcgttgggcggtcgcggcggttgttttcgaaaagcgtcggtatttcgcgattttgattcggtttttagtttttgttagcggtttaggttcgtagtggaggttatattaattcggcgttttgggaatcgttcgagtttattaggtgaga

SEQ ID NO: 2226 - DNA, 681 bp, Artificial Sequence
  chemically treated genomic DNA (Homo sapiens)
ttttatttggtaggttcgagcggtttttaaggcgtcgagttgatgtggtttttattgcggatttgagtcgttaatagagattaaaggtcggattagaatcgcggagtgtcggcgtttttcgaaagtagtcgtcgcggtcgtttagcgttaagaatgtatcgcgagtagcgttattttgagcgaggaaagaggaatcgagagaagaggattatgggatattggcggattgaattcggttattttaattgttttttttttttttgtttttttagggttttagatcggaaatggattttgtttgaagattcggatgtattcgtatagttttttttatttgtttttttttagggtcgagttttgattgttttttttatataatcgggaatattggagtaatattgtatttttttttttttttggagttgttagatgaaatataggatgtttatttagttaagttttaattttatataaataacgaattattttttcgtgcgtgtgttttaaatattgtatttgttaaatttgttaattttattttgttttttataatatttttttattttttttaatttaatgttacgtttttttttttttattttttttatgtatatttttatttttatttttttttgaattaaggaaagattaaattatagacgttaattttttttgggagga

SEQ ID NO: 2227 - DNA, 10191 bp, Artificial Sequence
  chemically treated genomic DNA (Homo sapiens)
  unsure 289: n is a or g or c or t
aagttttttttgttttttcggaataggaaagttttttatttatttttgtttttttttttttttaattgaagagtgtgattttggtatagagtagttttatatatgttatattggtttgattttttagagtaaaaaatgggatttttttagagaaaatttttttaaaaattttatgtgtttaggttttagagtagagaattttgtttttattatgacgttatttattggtaaataagttggcgtatagggatttgtgaggtttttagtagagttagggtagtagttattnttttgattgtttaatttttatgtttgtgttgatatgttagatttttatttttgcggaatgagaaattttttgagaataaagtttttttaaatagaataaaagtattaaattatttttgatgagtaaatattattttaaatttttttttaatttataaaagatgaggggtaatatttattagttttatagaaattttttttaaatagaatattagtgaattaaataattaattttttttaaatatgatagattaaatattagtcgttgtataagtattttaataataggttagtttacgggagtaaatagtattttagtttcgagatttgtttttttaattgtgtgtatagattttttaagtcgttatgaatttagatattttttatattttaataaaaatatttaggagaataagaaattaggatatgtattttttgtaagtagaagagaaatcgagtatttgtttttttgcgggggggtagtttcgtgttattttttaatttagtttttataggagtatgggtatattggtttaaatgaagtgtaaaggatatatttttgtttatagtgtaaattttatttttttaaggtggttaatcgattgagattagttttatatttttttaaagaaggaaaaatttagtagttagcgttaaggtttagcgattagagaggattcgtgttcgtcgcgatttcgttcgttttgtggtttcgcgatttcggcgtaggtgttggggggacggtttttttttttcggtgtgaggggttggtttttttttaggttgggggttggtaaattcgaatttcgtcggcgtttagtaaaggtttttttttcggcgttttcggttcgcgtttttaacgtatattttaagcgcgcgtattcgatttaaattttagagacgtttttgtggaacggaacggatggtcgttgatatttcgtcgtttaaatattaggaagttaaaaataatacgattatcgttattattttaaatttcggaatagtttttttaaaaatggaaaagacggtggttaaattttaattaaaatcgttgtggttaagaaagttttggaagttgttttattttaattttgggcggtttgcggttaatagacgcgcgatttagaaattttagaggtatcgtcggttttttcgtttttttttttttattatcgtttagtttttgagaggggagggtgttgtcggataggtgggttttcgggtatttattgttgttcgttcggtcgcggcgtttcgtttcgaggttgtttaggaagaggaaggcgcgttgtttcgtttcgcggataaggaggttttagcgagggcgtatttgcggtaggtgacgaaggaggcggcgtaaaatattcgtcgtgtacgtttcgcgggataaaaattacgcgttcgtcgggtcgcgtttaggtttcgttttaggatttcggaatcgtttcgtttttaagatcgaaaagtttagagtcgcgcgtttaagtacggtgttgggggtggggttttaggagcgtttagtaaggcgtttttgtcggcgtggattcgcgggtttaaaggtagtttttcggtgattcgtttagtttttttatgcgaattcgaacgatagtattatagttcgttagcgtcgagattcgcgttgtgttttaatttaggtgggcgtcgcggagtcgcgagtttgagttcgttttgtaggtgattcgcggtttttttttttttaggtatttttttttttgcggtttcgttttttataggtaatttttatttttcgcggtttttttttttttaagcgattcgtagcgttcgggttttttaggtgattgcgttttcgttaattttcgttttattatatatatatattttttcgttttttttcgttttattttttttaggtgattttattttcgtagttttttttttttcggataatttgtagtttcgtttttgtaggtgaacggcggtttagtttttgtaggtgattcgcggatttttttcgttcgttttattatcgttataggacgttttcgtaggcgtattggagtcgattgcgtaggagtcgattgcgtaggcgtggtttttatacgcgttgttttgttggcgttggtgcgggattgcgtaggcgcgcgggggtaagattggtagtgcgtttgcgcgcgtcggcgtgcggaacgtcgcggtgtttcggcgtttttgcgcgcgggaagatggcggaataggttattaagttcgtgttgtttgtgtgtttgggtaagagggcgtcgatttatttatagttttgacgttttttggagagttggatcgggtttgtgcgttgtaggttgtgtcgtcgcgttaggaattatgagggggaggaggttagggattggaggtttagggtgttttaggagtgtgtcgtagcgtttttgttttttattcgtttcgtgtattcgtttagtttgttcgttaaatttgggttttttcgcgtttgttatatattcgggttttttggtatttgtagttatagtttttataagttaaggtattttttttgcgattattagaatttttttcgtttttttttaatgggtttaggtaggtttggaggttgtcggattgatgtggttttttaggggttttttgagttttatgataatattgttttgtttgttagtttttttagtttatgtttagatagggatttgagttaaagggagatgaaagttttatcgtttcgcggttttttgtattgtaaaagttaagtaaaggagatttggaggttttatataattttgtttatgaaaatgaaagtgtatttatatgtttttaggaatttttagtttaaattatttttatttttagaattttaatatttagtttgttttattttaaatataatttattttcgtttggtttttagggatttttttttggtgtagtattataaggttatatttttcgtgtttttattttgagaggaaggtttaaattgttagtagttcggttatttaaaattttttgtgagtttgtattttttgtagtttttgtttatttttatagatttttattttattttttgtatttttttttgtttatattttcgggatattgttttttagaatttttcgttgttcggtagtattttatatgtttattgagtttttatcgttgggtgtttattatgtattttgtttggaaagtttttttattttataaagttaaatttaaatatttttttttttgtttttttagattatgagttgttttttatcgtattttttattatataaatttattataattatttgatagtttgttgaaattttagttgagtttaattttgtcgatggtaataattgtggtttattttttattttgtttttagttttaggataatatatgataaacgttgattaggttttgtagaagttaatttttgtgaaagacgaattagaaggtttattttgttttatattggtagtgggtattatttgatttttaagatttattgaaggttgaatgatgaaattaataagtttattaaatagtagtttggttaaggatggttattaaataatattttatttttttgtatagttttggttggtattgtcgattatgttggtataattgtattatggttgttgttaatggggaagtgtatttttgtatatatagtagttttattttagttgtaggggatatattttaagattttttagtggatttcgaaattgtgggtagtattaaatttaatttttgttaattggaatatgtgtttgttcgttttttatatttataaatgtaatatcgttgttattttaattaatatttaaaattgtggtcgtaatttttgtagtttgaggtaagatagtagacgtattaggaattttttttttgtttatatttttatggatagaagatttgttcgtattgtagattttagtaattttgtttatatttttatggatagaagatttgttcgtattgtagattttagtaatttcggtaataagttttttttttttttttataagaagtcgaaaaagtttttatttttttatttaagggtagtagtttatggtttttttttgtcgtatttgaattgttagttttattatttttatgatttcgggttattattagtaaattaagggtgattcgaatttaggtattgtgatagtattataatggatttgataagttagagggtaataggtggatagatagtatggatatgttggataaagacgtgttttatttttggggtaggacggaatgggatggtatgagaatttattttgttatttagaatagtgtataatttaaaatttaggaattatttgtggaattttttatttaatattttttaattgaagttgatatggggtaacgatggaagtaaaattttggaaaagaggggattattgtattttaatataatttagtgattttttgttgttgttgagtatttattatatggtatgtatttttttaagtggtgtggtgaattaaatagataaaaattttagtttttttggagtttacgtttttttagttattagtaagtattaattgatgtgtttaatcggttgatgtgaagattaagaaaatagagtagaaaggggaatgggagtggagtgtagttttgagtgggatggttagggaaggttttatttgatagatgatttttgagtaaagatttgaaggaggtgaggaagaagtttaggatattttggagaagtattttgaatttagaggaaagtaggtaaaagttttgaagggagaatattggttatggttatgaatcgtaggaagttgtagtggttgggttagtgtagcgatagttttttttagttaggattttttatttatatttgaaaatttagtagataatttgagcgtttgtttttttagtgtttttattgtagatgtatagggagaagttaattttttatatatattggttttttagggtaggagtttgtaaattttttgtttaaagaattagattataattattttagattggttttatatgatatatagaaagggtgtagtataaagtagttatttatatgatgaatttggttgtgttttagtggatttttatttgtggatattagaattggatggaattttgtataatttttatatgttataaggtattttatttttagattttttttaattatttaataatgtaaaaattatttttatcgttgtgggttgtatataaaggtagtggtttatgagtcgatttttagatttttgttttaggtttagattttgggaggttatgtgaagatttgggtttattttgaataaatattggagggttttgagtagaggtgggaagtgattaaatttaagtttaaaaagaagagttttagttgttgttttgagatgaaattggaggtggagtatgtttttattggttgtattttgagggaatttgagcggtaaatggtattttatttggtagttatatagaggatagtaagagttgtatgtttttgaaatgtaaaaaattttgtttatttaaagtatttgtttggattttggtgagattgaagtgtagaaaagtattagaggttttttattggtgaagttaatgatggaaatataattgagttttttattatagtataattatgaagggtgttttatgtttttgtaatagagatttattagtgaagatgatgtaggagttatgatttagttagtatggttggtggagatagtatatgttggtggagttattttatttttggagtttatatattgggtgttgggttttttattaggtatagtagatatagttttatttttttagagtttatttgttttttatgagtttttatttttgaattgaagatgttgaagaagggtataaaatagtttgtttaatttggaaaagataaatttgagattttatagattgaaatattttttaaaggtatttgaagatggaatgttttgtttttagaatttgtttgataggcgaaatttgaagtatatgtagtgttttattgatgatcggggtgttttatttttttataataaaatttggtgggtattaattttcgaaattaatagggtaagttagttatttagatagttaataatgtaagtttttatattgttgtggggaaagtaagttgttattttatagttaaagataattatttgtaaagttgtggggttagtttttattatatttttagatgttgagatattaggtatttgttgttttatagatttaaaataataattgttttaatttggaatataatgtttgttgttaaaaatatttttagggtatatggtgataagtaaaagagttatatatttatggaagttttttaataattaaaatagtgtttgatgataatatttgtttagaaattaaataaaatttagaatgtcgaaagaaaattttataatataaattagtatatagaggtatttaagttatttgtgtttttttttttatcggttgtaggtagatttttattgttgtgaaattatagtttttgtgggaaaaaagtacgtaatatgtttaggttttataatgtagaaattgaaggttgtagtaaggtagtgagttggttttttgaattagggaattagttgttttataatattagaagattttttattgtatttgtttattataaatagaagattttaatagtgataaagagttaaatttttagttagtgttgtttatttttatagtttttttttttcgtatttgttttttaaatttagtttttaatgtttggatttagtgtggtgttttggtattaaggagattggaaggttttagagtagttttagaagtaaggtcgtagaaattattatttattttttttagcgtagattatagaaattagaattttttttttgtaaagtaagttataaaatttagaaagattatttttttttttttgtttttttttgaagatagtattttagaggggttttgtttatttttgggggaggaaatgttgtggttttgttgggttttttttagtttgttattattggattatttttttttgtttagtgttatttttatatagttgtgtattggttatttaagtattaaaatcgtttttttgggtttttgggtttttatttttgaaggtttttgttaatttgttttttgttataggagtattttttatgatttttatgatgggtgaggaaagttgttatatttttttattttgatattgttttgtatttgtttttttatacgagttttttataaggtttttttaatttagttatgtgtttttttagtgtttttttagttgtgtcggtaattttggtaatttgtaggaagggtttgtgttttaaataattttttgtttttaggttagggtatagtttggtatagagttggtatataaaatatgtttgttgaataagttatattattttttttttataggattttttatttttttttatagtcggttacgtaaagtttaaatgttggtttagtgtttagggtttttgtatattagttcgttagttttagatattggttttttgtatttgaagtatcgtagttttaatttgtttagtgttataatttttttgagttaaatgtttttttttttttttgtttattaagattttgattatttttttaatattatttttaattttttttttttttggtaagaaatttttttatattttgtttttgttttgtagtatcgttttttttttgtgttgttgtagtgtattgtttattagtatttatttttttatttttattataataaatataataaataaagtggagatagagtttagttgaatggttaggtgatttaatttattgtgttttttttcgaaaaatttttaatatatacgacgtattatgttgttgaaggagttttttgggttggtagtgttttttgaatattgttttatgttgatgataggagagtaaggtgtttagagggtatagtggagttatttgttaggaattttttagaaatgttttataggttatttgttttggggttgttttgtttgtttgtttgtttgtttttgtttttgttgttgttattataatgaaattgtaatggtaagtgttttgtttttttgagtttggggagtaattttaggggattattaaatttgagggagttttggggaatttggattttttatttgttggtttaaagtaaggatggttttgatgtcgatatcgtggtttggagagtggtgtttttgattttgggttgttaatgtttggatttgtatttttgggtttaggttttgtatgtgatcgtttagtaaatgttggtgttgaatcgttgtttatgtttaaatgtatgtttgtgtgtttgtgtattgttttgtgaaatagtagttatttttatgtgtgatatatttgaaaatatatatagttgattttttagttataggggtttgaattttgaaggatttattcgaggaattttttttaattaagtatagatggaaatatcgtgttgtttgaatgtagaaatttatttgtatgagggtttgatttttttatattgggtttatatttttagggttaattatagattttgagtatgtagcgttttggtatattgggtagggtgggagggtgttttgaattagttgtttgagtttattgagggatagattattgtattttatttttattttgttgtattttattttaaaataagttggttgtaatttattttattttcgtgatttatttttggattattagtagtaattttttaaataataattttgttgaaattgtttttgatatttttgttatttgtatttggagtatttggttggttggtgttaaattattgaatttgagtttgataggttgttttttagtagggtttatttttattggttggataaaggcgttaaaggatagtgttggtttttgttttttttgagggatagtatagttttcgtgtgttaggtgtgtaaagaaggggagttggtatgtgtttttttatttaatttaattttgtttttttatttttttttttttttaaaggtaatatttgtcgattatttattgtagaagtagtttttaggaaatttgtaatcgattaaaatattttagagaatgtaagtattatttaggattttaaagaggttaatttgaatttttttgggtaggaaattgtaaaaaaaaaaaaaaattttatgttttttttttgtagtggagggtagatagcgcggtaattttcgggtatgagatagggaatttttttgattatcgagggtagagttgtatgaagaggtacggtatttttatgagttacgttgttcggtaggtatcgtttttggatttgaagttgtgtgttttgtgttttagtgggttattgatagcggtgttgtttttgattggaacgtgggtcggtttttagatttaagagttgtgagttgtttaaagaaattatggtatttatatagtttataaagtaagataggtagataagtttttgtttaatttttaatatatagagtttagtaatttgagaagtagcgaaaggattaattagatttgtatattaatgaatgtgtttatttagggtgagtttattagttatgtgtgtttattttgttttatttttggttgtacggtgttgaaagrtttgtttgattttggaatttatttattaaaatgtatataaaagttaggtaatttataatgagagagtttgattgtgcgttggggttgagcggtgttttgttttttgtttttttttgtataatttttattaaatatttaggttatagtaattattttgttgatattgtaagtttgttgttagaatgaggttatataatatatataaaaatatttttttaattgtaaagtgttttagtaatatagggtaatattagtaatat

SEQ ID NO: 2228 - DNA, 10191 bp, Artificial Sequence
  chemically treated genomic DNA (Homo sapiens)
  unsure 9903: n is a or g or c or t
atgttgttggtattattttatattattaaggtattttatagttgaaaaaatgtttttgtatatattatataattttattttagtaataaatttgtaatattagtaggatgattattatggtttaaatgtttaataaaaattatgtaggaaggaatagaagatagagtatcgtttagttttagcgtatagttaggtttttttattataaattatttagtttttatgtgtattttaataagtaaattttaaagttaggtaagytttttaatatcgtgtaattagaagtgaaataaaatggatatatatagttggtaagtttattttaaataaatatatttattaatatataagtttggttaattttttcgttattttttaagttattggattttatatattagaaattgaataagagtttgtttatttgttttgttttatgggttgtgtgaatgttatgatttttttaggtagtttatagtttttgggtttggggatcggtttacgttttagttagaaatagtatcgttgttaatgatttattgaaatataaaatatataattttaagtttaaggacggtatttgtcgggtaacgtggtttatgggaatgtcgtgtttttttatgtagttttgttttcggtagttaggggggttttttattttatattcggaagttgtcgcgttgtttattttttattgtagggaagaaatatggaatttttttttttttttgtaattttttgtttagaggagtttaggttggtttttttaagattttgaatggtatttatattttttgagatgttttgatcggttataagttttttgaaaattgtttttgtaatgggtgatcgataaatgttatttttaaaaaaagggaggggtggggaaatagggttaggttggatggaagggtatatgttagttttttttttttatatatttgatatacgggggttgtgttattttttaggaaaaataaaggttaatattattttttgacgtttttgtttaattagtgagggtagattttgttggagaatagtttattaggtttaagtttagtgatttgatattaattagttaagtattttaagtatagatgataaagatattagaaataattttaataaaattattgtttaaagagttgttattaatgatttaggagtgaattacgaaaatgaagtgggttgtaattagtttattttaaaatgaaatataatagaataaaaataaaatatagtggtttgttttttagtagatttaggtagttggtttaggatatttttttattttatttagtatattaaaacgttgtatatttagggtttatagttggttttgagaatgtgagtttagtataggaaagttaggtttttatatagatgggtttttgtatttagataatacggtatttttatttgtgtttgattgaaaaaaatttttcgaataaattttttaaagtttaaatttttgtggttgaagggttaattgtatgtatttttaagtatattatatataaggatgattattgttttataaaataatatataaatatataaatatgtatttaagtataaatagcgatttaatattaatatttattgagcgattatatgtaaagtttgagtttagggatatagatttaggtattagtagtttaaggttagggatattattttttagattacgatgtcgatattagggttatttttattttagattagtaagtgagaaatttaggttttttagggtttttttaggtttgataattttttagaattattttttaaatttaggaaagtagaatatttattattataattttattatagtaatagtaataaaaataaaaataaataaataaataaataaaatagttttaaagtaagtgatttatagggtatttttgggaggtttttaataggtagttttattgtgttttttgggtattttatttttttgttattaatatgagataatatttaaagagtattgttaatttaggaagtttttttagtagtatagtgcgtcgtgtgtattgggggtttttcggagggagatataatgggttgaattatttggttatttagttgaattttatttttattttatttattatatttattataataaaagtgggaaaatgaatgttgataaataatatattatagtagtatagaaaaagaacgatgttataaagtaaaaataagatataagaaaattttttattagaaaaaagaaagattagagatgatattaaaaggatgattaggattttaatggatagaggaagggaaaggtatttaatttagagggattgtggtattaagtaggttgaggttgcgatgttttaggtatagagagttagtgtttgaaattgacgggttggtatataggagttttaaatattgggttagtatttgaattttgcgtagtcgattatgaggagaaatagaaagttttatggaaaagggataatatgatttatttaataaatatattttgtatgttaattttatgttaagttgtgttttaatttgaagatagaaagttgtttaaaatatagattttttttataagttattaaaattatcggtatagttaaggaaatattagaagagtatatgattgaattggagagattttgtaagaggttcgtatgaaggagtaaatataagatagtgttagagtggaaaggtgtggtagttttttttatttattataaaggttatggaagatatttttgtaataaaagataggttaataagagtttttagaaatgaagatttaaagatttagggaaacggttttgatgtttagatgattaatgtatagttgtgtagaaatggtattggataaaaggaaatgatttaatggtagtagattgagggaaatttagtaggattatagtatttttttttttaggaatgagtagggtttttttgaaatgttgtttttaagagaaggtaaaagggagagagtgatttttttaggttttatggtttgttttgtaggagaggagttttagtttttatgatttgcgttggggaagataaatgatggtttttacgattttgtttttggggttgttttgaggttttttagtttttttaatgttaaagtattatattgagtttagatattaggagttgaatttaggaaatagatacgaaaaagaggaattgtgagaataggtagtattaattaagagtttagttttttattattattagggttttttgtttatgataaataaatataatgaaggattttttagtgttgtaaaatagttaattttttagtttagaaaattaatttattgttttattatagtttttagtttttatattgtaagatttaagtatattacgtattttttttttatagagattgtagttttatagtagtaaaaatttatttataatcgataaagggaaagatataaatagtttgaatatttttatatgttaatttgtgttgtgaagttttttttcgatattttaaattttgtttagtttttaaataggtattgttattaggtattattttaattattgaaaggtttttatgggtgtgtaatttttttatttgttattatatattttgggaatatttttaatagtaaatattgtattttaaattaagataattattattttggatttgtagaataatagatgtttagtattttagtatttaaaaatataataaagattagttttatagttttataaataattatttttaattgtaaaataatagtttattttttttataataatatgaaaatttgtattattaattgtttaaatggttagtttgttttgttgatttcgaaagttgatgtttattaaattttgttatgaaaaaatggagtatttcggttattagtgaaatattgtatgtattttaggtttcgtttattaaataagttttaaaaatagaatattttatttttaaatgtttttaaaaaatgttttaatttgtaaagttttaagtttgttttttttaaattaggtagattattttatatttttttttagtatttttaatttaaggatggagatttataaaaggtagataggttttgggagggtggggttgtgtttgttatatttggtaagagatttagtatttagtatgtgagttttagaagtaaagtgattttattagtatgtgttatttttattaattatgttggttgggttatggtttttgtattatttttattaataagtttttattgtaaaaatataaagtattttttataattgtgttgtagtaaggagtttaattatatttttattattagttttattaatgaaaaatttttgatgtttttttatattttaattttattagggtttaaataaatgttttgaatgaataaagttttttatattttaaaagtatataatttttattgttttttatatggttattaagtaaaatgttatttatcgtttaaatttttttagaatgtaattagtaaaggtatgttttatttttagttttattttaaaataatagttgaaatttttttttttaaatttaaatttgattattttttatttttgtttaaaattttttaatgtttatttagagtaagtttaagtttttatatggttttttaagatttggatttaaaataggggtttgaaaatcggtttatggattattgtttttatgtatagtttatagcggtaagaataatttttatattgttgagtagttggaaaaaatttaaaagtagagtattttgtgatatgtgaaaattatatagagttttatttaattttgatgtttataaatgaagatttattagaatatagttaggtttattatatggatggttattttgtgttatattttttttgtatgttatgtgaagttaatttaaaataattataatttggttttttaaataaagagtttgtagatttttgttttaaaggattagtgtatataaggaattaatttttttttatatatttataatggaagtattgagaaaataggcgtttaaattatttgttaaatttttaggtatagatgaggaattttgattgagaaaaattatcgttgtattagtttagttattgtagttttttgcggtttatgattatggttagtattttttttttaaaatttttatttgtttttttttgggtttaggatgtttttttaaaatattttaggttttttttttattttttttaagtttttatttaaaagttatttattaggtggggttttttttgattattttatttaaaattgtattttatttttatttttttttttgttttatttttttaatttttatattaatcgattgagtatattaattaatatttgttggtgattgagagaacgtgagttttagagaggttgggatttttgtttgtttggtttattatattatttagaggaatgtatgttatatagtagatgtttaataataataaaaaattattgaattgtattgaaatataatagtttttttttttttaaggttttgtttttatcgttattttatgttagttttagttggaaaatattaaatgaagaattttataaataatttttaagttttaaattgtgtattgttttgagtagtaggataaatttttatgttattttatttcgttttgttttagaagtgaaatacgtttttgtttagtatatttatgttgtttatttatttattgttttttagtttattagatttattgtgatgttattatagtgtttgagttcgagttatttttagtttattaataatggttcgaaattataagagtagtgaagttagtaatttagatacggtaaagagaagttataagttattatttttaagtaaaaaggtgaaagttttttcgattttttatggaaagaaaaaaaaaatttattatcgaggttattaagatttatagtacgaataaattttttatttatgaaaatgtaaataaggttattaagatttatagtacgaataaattttttatttatgaaaatgtaaataggaaagaaatttttgatgcgtttgttgttttgttttaaattgtaaaagttgcgattatagttttaaatgttagttaaggtggtaacggtattatatttgtgggtgtaagaaacgagtagatatatgttttaattgataggaattgggtttggtattatttatagtttcgggatttattggggagttttggaatgtattttttatagttaaagtgggattattgtatatgtaaggatatatttttttattaatagtaattatgatgtaattatgttagtataatcgataatattaattaaaattatataagggaatggaatattatttagtaattatttttaattaaattattgtttaataaatttattgattttattatttagtttttaatgagttttaaaaattaaatgatgtttattattaatgtgaaataaggtaagttttttaattcgttttttatagaagttaatttttataaaatttagttagcgtttattatatattgttttaaagttgaaaataaaatgaaaaataagttatagttattgttatcgataaaattaaatttagttgggattttaatagattattaaataattatagtaaatttgtgtaataaaagatgcgataagaagtaatttatgatttgggaaagtaaaggaggaaatatttaggtttgattttataaaataaaaaggttttttaggtaaaatgtataatgggtatttagcgatgaaggtttagtaagtatgtgaagtgttatcgaataacgaaaggttttggaaggtagtgtttcgagggtgtgagtaggaaaaggtataggagataaagtaggagtttgtaaaaataaatagaaattgtaggaaatgtaaatttatagaaggttttaagtaatcggattattgataatttaggttttttttttagggtggaggtacgaggaatataattttgtagtgttatattaaaggaagatttttgaagattaaacgaaaataaattatgtttgaagtaaggtaagttaagtgttgaaattttaggagtgaaaataatttaagttggaagtttttgaaagtatataaatatatttttatttttatgggtaaagttatataggatttttaggttttttttgtttggtttttataatgtaagaaatcgcgaaacggtaaaatttttatttttttttaatttagatttttatttaagtatgggttaaggaaattagtaaataaaataatgttgttataggatttaggaggtttttaagagattatattagttcgataatttttaggtttatttgggtttattggaggggaacgagagggattttagtagtcgtaaagaaagtattttggtttgtaggggttgtggttgtagatgttaagaggttcggatatatggtaggcgcgaggggatttaggtttagcgggtaggttgggcgggtgtacggggcggatggggaataggggcgttgcggtatatttttagaatattttaggtttttagtttttggtttttttttttttatggtttttagcgcggcggtataatttatagcgtataagttcgatttaattttttagaggacgttagaattatgagtaagtcggcgtttttttatttagatatataaatagtacggatttggtagtttgtttcgttattttttcgcgcgtagaggcgtcgagatatcgcggcgtttcgtacgtcgacgcgcgtaggcgtattgttagttttgttttcgcgcgtttgcgtagtttcgtattaacgttaatagggtagcgcgtgtgagagttacgtttgcgtaatcggtttttgcgtaatcggttttagtgcgtttgcggaggcgttttatgacggtagtaggacgggcggggagggttcgcgggttatttgtagggattgggtcgtcgtttatttgtaggggcggggttgtaggttgttcggaggaggaggagttgcgggggtggggttatttggagggagtagggcggaagaaggcgagggggtgtgtgtgtgtggtggggcgggggttggcgggggcgtagttatttggagggttcgggcgttgcgggtcgtttggaggggaaggagtcgcgggaggtaaaggttatttataggggacggggtcgtaggagaaggggtatttggaggaggaagggtcgcgggttatttgtagggcgggtttaggttcgcggtttcgcggcgtttatttgggttggggtatagcgcgagtttcgacgttggcgggttgtggtgttgtcgttcgagttcgtatagaggggttgggcgggttatcggggaattgtttttgagttcgcgggtttacgtcgataggggcgttttgttgggcgtttttgagattttatttttaatatcgtgtttgagcgcgcggttttgggtttttcgattttgaggacggggcggtttcgaagttttgaggcgaagtttgagcgcggttcggcgggcgcgtggtttttgtttcgcgaaacgtatacggcgggtgttttgcgtcgtttttttcgttatttgtcgtaggtacgttttcgttggggtttttttgttcgcggggcggggtagcgcgtttttttttttttgggtagtttcgggacggggcgtcgcggtcgggcgggtagtagtgagtattcggggatttatttgttcggtagtattttttttttttaagagttgggcggtggtgggaggaggaggacgggaaaatcggcgatgtttttggggtttttaggtcgcgcgtttgttaatcgtaaatcgtttaaagttaagatagagtagtttttaggatttttttgattatagcgattttgattgaagtttagttatcgttttttttatttttagaaaagttatttcgaagtttggaatgatgacgatggtcgtgttatttttaattttttgatatttgaacggcgaggtgttagcgattattcgtttcgttttatagaagcgtttttgaagtttgggtcgaatgcgcgcgtttggaatgtgcgttggaaacgcgggtcgaaggcgtcggggaggaagtttttgttaggcgtcggcgaggttcgagtttgttagtttttaatttgaagagaagttagttttttatatcggaagggaagggtcgtttttttaatatttgcgtcggggtcgcggggttatagggcgagcggggtcgcggcgagtacgggttttttttgatcgttgggttttggcgttggttgttgagtttttttttttttaaggaagtgtggaattggttttaatcggttgattattttaaggaaataggatttatattgtggatagagatgtgttttttatattttatttgaattaatatgtttatgtttttgtggaggttgagttggaaagtgatacgaagttgttttttcgtaagagagtaggtgttcggttttttttttgtttataggagatgtatgttttgattttttgtttttttaggtgtttttattgagatgtagggaatatttgaatttataacgatttagaaaatttgtatatatagttgagagaataggtttcgaggttaaggtgttgtttattttcgtgggttggtttgttattaaaatatttgtgtagcgattgatgtttagtttattatgtttgaggagaattggttatttggtttattaatgttttgtttaaagaaaatttttgtaaaattagtaaatgttattttttattttttgtaagttaaaaaaaagtttaaaataatgtttgtttattaaaagtgatttgatatttttgttttgtttaggaaaattttatttttaagagattttttatttcgtagaaataaggatttggtatgttaatataaatatagaagttgagtagttaaggnaataattgttattttgattttgttgagagttttataagtttttgtgcgttagtttgtttgttagtgagtggcgttatgataagagtaaaattttttgttttgagatttaagtatatgaagtttttaaaaaaattttttttgagaagattttattttttattttaaaagattagattagtgtggtatgtgtggaattgttttgtattaagattatattttttagttggagaagaggaagggtaggaataaataaagggtttttttgtttcgagggagtagagaaagttt

SEQ ID NO: 2229 - DNA, 1911 bp, Artificial Sequence
  chemically treated genomic DNA (Homo sapiens)
attattaagtaggttttaggtggggtgggtggaggggagtttttttatttgagaaatgtagaatgaattagatttttttattatttaaagttggtatttggttttaggtttttttttaatttaaaatttatatataattagaatttttatatatttttggaatgtagtatgttgaaatttattgtgtaatttttgttttgtgtgtgtttgtatattatgtaggtttgtttgttaaattgagtttgtaaattaaaaagtattttaaataggttttaattaatttagaaagtttttgttgttaaggttaaggatgtattcgtggtatagttttaggagggaggatatttttgttaagtttaagggtgtatttttgattataagggtttaaggtggtcggggtatagtttgtttttatatattttagggagatatgaggtattaattaatatatgggagatttatattggttttatttggaagggtaggataatttgaattggggggtttttaggttataggtagatttaaatatattttgattggtaattgattgaagaattattattagtagaaaggagtgtttgggttatgaaataggggttgtagggagtagatgatgtttttaggtagcgggatttagagagaaaatagatggtaaatgttttttattagatttaaggtttatgtcgatgttaatgttgggggttatgatgtggtatggtttgaacgtttttcgggttaaagtttagagtattttggcggatagggaattttatttagatggttgttggggggttttcgaattttatttttggtttataagtttttttattacgtgcgttagggttagtaaattatagtttatggtttaatttggtttgttatttgttttttgtaaataaagttttataggaatacgtttatatttttggtagttgttttgtaagtacgtagtagggttgagttgttgtaatatagattatagggtttgttaagttttaattatttgtgtttcgattttttaagaaatattttttttatttttgagttaagtagaataagaggggttggacgtgtaggatttagagtgggagcgaggagggttggggtgaggatagttttgttatattttgtttttttgttatttaggttttgggggttttttttgtttgagggtttcgttttttgttgtttggtcgtgattcgtagtataagtatagataagttttagggaataaaaggtagggttgttacggaagtttatttattaatttttattttttatttttgtgttcgttttgttgggaaatattttaggttttggttaaggttagtgtagttttaggttttcgagcggtaggttgggtgcggattatggttttttataagttgttggtgattttttttaaggttttgtttaagtttttttttatttttaattagtttttgttggggtttggtttttttaatttgttttttcgtattatggtagtcggggggttgtagatgatcgggtttatgagtaaggatatgtattaggtaggagtgggggttattcggggggtttgggttttatttatgtttttatttatagatcgtggacgagggaagggggttattgtttttttatttggggaggcggggagtttgggttttattttatattattcgtatgtagattatggacgagattaaggaaggtatttagtacgtgttttagattaggaatttatttatattggttatttttggttcgggatattgtgttttggaggtcgttttggttaatgtgttggagtttggggatttttttttggttggggttaatggtatttgggggtagcgagtcgtggatatcggggagcgtataggtaagggagaggtttaggtggggatggttttggatttatt

SEQ ID NO: 2230 - DNA, 1911 bp, Artificial Sequence
  chemically treated genomic DNA (Homo sapiens)
gatggatttagggttatttttatttgggttttttttttatttatgcgtttttcgatgtttacggttcgttgtttttaaatgttattggttttaattaggaaggagtttttaggttttagtatattgattagggcggtttttagggtatagtgtttcgagttagagatgattagtgtgagtgggtttttggtttggaatacgtattggatgttttttttgatttcgtttatgatttgtatgcgggtggtatagggtgagatttaggtttttcgtttttttaagtgaggaggtagtgatttttttttttcgtttacgatttgtgggtgggaatatgggtgagatttaggtttttcgagtgatttttatttttatttggtatatatttttgtttatggattcgattatttgtagtttttcggttgttatgatgcgaggaggtaggttggaaggattaggttttagtaggagttggttggggatggagaggggtttgagtagggttttggggggggttattagtagtttgtgagaggttatggttcgtatttaatttgtcgttcgggaatttggggttgtattggttttggttaaagtttggaatattttttagtagggcggatatagaggtgagaggtgaggattggtggatgggttttcgtggtagttttgttttttgttttttgaggtttatttgtgtttgtgttgcgggttacggttaggtagtaggggacgaagtttttaggtagagggagtttttagggtttgagtgatagaaaaatagagtgtgataaagttgtttttattttagtttttttcgtttttattttgagttttgtacgtttagttttttttattttgtttagtttaggggtgagagaagtgttttttaaagggtcggagtatagataattgaggtttggtaggttttgtggtttatgttgtaataatttaattttgttgcgtgtttgtaaagtagttgttagaggtgtgggcgtgtttttataaaattttatttataaaaagtaggtggtaggttagattgggttatggattgtggtttgttgattttggcgtacgtgatgggaaggtttgtaaattaaaaataaaattcgaaggttttttagtaattatttgaatggggttttttgttcgttagggtgttttaaattttaattcggaagacgtttaggttatgttatattataatttttagtattaatatcgatatagattttaagtttgataggaagtatttattatttattttttttttaaatttcgttatttgaaggtattatttgttttttgtaatttttattttataatttagatatttttttttgttgataataattttttagttagttgttaattaaaatatgtttaaatttatttatgatttggaagttttttaatttaagttgttttgtttttttagatggaattaatgtaaattttttatgtattgattgatgttttatatttttttaaaatgtataaaagtaagttgtgtttcgattattttgggtttttgtggttaggggtgtatttttgagtttggtaaggatgtttttttttttgaggttgtattacgggtgtatttttagttttggtaataaaaattttttaaattaattgagatttgtttgaggtattttttggtttataggtttaatttagtaagtaaatttgtatggtatatagatatatataaggtaggggttgtatagtgagttttagtatgttgtattttagagatgtatagaaattttagttatgtataagttttaggttgaaaagaggtttggaattaggtgttaattttagataatagggaagtttaatttattttatattttttaaataaagaggtttttttttatttattttatttggggtttgtttgatggt

SEQ ID NO: 2231 - DNA, 1432 bp, Artificial Sequence
  chemically treated genomic DNA (Homo sapiens)
ttaaatttcgtgagtgttggtttttaggaaatttggagttttggcgtttaaattttggtttaggaaagtaggagttatttaggaagtaggggttttttagggttagagttagttttttttgttttcgtttacgttgcgttagtatttgtttttttaaagttattaggtaggcgttagcgcgcggtgaggggaggggagaaaaggaaaggggaggggagggaaaaggaggtgggaaggtaaggaggtcggttcggtgggggcgggattcgattcgtaaattgttgtatttgttttttattttttagcgtttttttcgagatttcggggagttagtttgttgggagagcgggacggttcggagtaagtttataggtagaggaggcgatagagggaaaaagggtcgagttagtcgttttagtgttgtataggagtcgaagggacgtattacgttagttttagttcggttttagcgatagttaacgttttttgtagcgcggcggtttcgaagtcgtcgttcggagttgttttttttttttcggtgaagtttttaaaagttgttaaagattcggaggaagtaaggaaagtgtttggtaggattgacggttgtttttgttttttttttttttatttcgtttttttttattttgttttttttttttttttcgttttttttttcgtagttgttttagtcggttatttttagttaattttttttattatttttttttttattcgttttttcgttttcgtcggtttagcgttgttagttcgagtttgtagagaggtaattttttttggttgcgagcgggcgagttagttgtatattgtaaagaaggtttttaggagttaggcgattggggagcggttttagtattgtagttacgattcgtttggttaggttgtacgcggagagaattttttgtttttttttattttttttttatttttttttgttttttttatttcgagtgcggagttagagattaaaagatgaaaaggtagttaggtttttagtagttaaaaaataaaataaataaaaataaaaaagtcgaaataaaagaaaaagataataatttagtttttatttgtatttattttagtggatattgaatttggaaggtggaggattttgttttttttttttaagatttgggtattttttgaatttattttttaagtattaagagatagattgtgagtttagtagggtagattttgtttatcgtgtgtttttttttgtacgagattttgaggttgttagagcgttttttgcgtggttgttttcgtaagtttttttttttggagtttttcgtaggtgggtagttagttgtagcgattatcgtattattatagtttgttgaatttttttgagtaagagaaggggaggcggggtaagggaagtaggtggaagatttagttaagtttaaggatg

SEQ ID NO: 2232 - DNA, 1432 bp, Artificial Sequence
  chemically treated genomic DNA (Homo sapiens)
tatttttgagtttggttgaattttttatttattttttttatttcgttttttttttttttgtttagaagagtttaataggttgtgatgatgcggtagtcgttgtagttagttgtttatttgcgggaagttttagagaaggaaatttgcgggagtaattacgtaaaaagcgttttgatagttttaaagtttcgtgtagaagaagatatacggtggataagatttgttttgttaggtttatagtttgttttttaatatttgaagggtagatttaaaagatgtttagattttaaaagaaaaaaataaaattttttattttttaaatttagtgtttattgaagtaggtgtaaataagaattgagttattattttttttttttatttcggtttttttgtttttgtttgttttgttttttggttattgaagatttgattgtttttttattttttgatttttggtttcgtattcggggtggggaaggtaggaggaggtggagagagagtgggggaaaatagagggtttttttcgcgtgtagtttaattaggcgggtcgtggttgtagtgttgaagtcgttttttagtcgtttggtttttaagagttttttttgtaatgtgtagttagttcgttcgttcgtagttaaagggagttatttttttgtaaattcgggttggtagcgttgggtcgacgggggcgggggggcgggtggggagaagggtggtgaggggggttggttgagagtagtcgattgaggtagttgcgggagagaagacgggggagggggggaaggtagggtggggggaggcggggtggagaggaggaggataaaggtagtcgttagttttattaggtattttttttgtttttttcgagtttttagtagtttttaaaaattttatcgaagaggaaagggtagtttcgggcggcggtttcgaagtcgtcgcgttgtaagaggcgttggttgtcgttggagtcgggttggggttggcgtggtgcgttttttcggtttttgtatagtattggagcggttagttcggttttttttttttttgtcgttttttttgtttgtgggtttgtttcggatcgtttcgtttttttagtaagttggtttttcgggatttcggagggggcgttgggaggtggagagtaaatgtaatagtttgcgagtcgggtttcgtttttatcgggtcggtttttttgtttttttattttttttttttttttttttttttttttttttttttttttttttatcgcgcgttaacgtttgtttagtggttttggagaaataagtgttggcgtagcgtgggcgagggtaggagaggttagttttagttttggaggatttttgttttttgaatagtttttgtttttttaaattaaggtttaggcgttagggttttagattttttggaggttagtatttacgaaatttgg

SEQ ID NO: 2233 - DNA, 2124 bp, Artificial Sequence
  chemically treated genomic DNA (Homo sapiens)
gtaggtttttgttgttgcgagtatgggttagtttcgttatatggttgaggttttattttgtttatttgatttattggattggatggttataaaataaagagtattttattaatttgagttttgatggtttttggttattgaatatataatttaagtatataggtttttttagtttgtatgttataaagaaatatagttattttgaaagagtaatgagattaatttagtaatttttaagttaattgattcgttttagaattttaattttgttatttgaaaaatgaaaatattatttatttgtgaaaatattttgtaagttaaaaattattttgtaattgtggtattgtttgagatttaagggataggtcgggtataaataaaggttttttagttggtagaggacggtgttgttatgtattgttattattttgttatatattaaaattgatgttttaatattatgacggggaatttaaatatataaatatttagatgtttttatttttttaatagtggaaattttttttatatatttatagtttgtttgtattatggtatagttaaatttatgtttttttttaaataagtaaagtagttaagtgatagttgagggaatgggaattttgaattaagagttttgtgtattttaattgaaaagtttattttttttaatatttaagagtttgaagatataagaagaatagaatttttatttttttgagagataagaagatttaatggtaggttgttatggaagttaaaaaaaaaagagtaagaagatagagaggtatagttagtattaataatgaaagtttaaaatttaatttataggtatttgatgtaatagttttttttttagttttttgtggagtaataggtttaattagtttatttattttttgatatgtttttattttattggtattttagagtatatttttttttgttagaaatatttatttatatttattggtggtgtgcggggagggggaagtttttttaagtatttttaagatatatataagatggagagtaggtatgggtttgatataaaatttaaaaattagtttttatattgggggtgaaatagatattgatattttaggtttattattaatcgttatatgaaggagtttagtggtttattgattttagtatgtattagaattatttgaaaggtttgttaaaatagattgttagaatttattttttaggattggtttaggttatttttagggttttttttagttttattatttaataattaataagttattttataatttaagttgttaagattttaaataataataaaatttttaaaataaaggaaggggagatttaaataattcgttttttgtacgtgtttgttttttaataatgttattaagtgttttatagtagaggaagtagagtttttatgaaagaaaataggtaagataataagttatagaggttgttttttttaatattaaagggaaaaaagagaagtagagttattttttaggttatatttgaaattttagttaaattggtgagtgatgatgggaatattttttttttatgtttttaaattgtataaagttatagtaaaattgtgttttaaattattattatatgttaatattattaaagtattgttgttaataattttaattaaataatttttgtttaagttttttatttatattagaagttttaataatgttttttattataattttagagttatatagattttagggttatttaggaagttcgaatttaataataattaataaatagtatacggttttttttaatatatttggtaatggagttaaaatattattatttttttttgtaaagagtttgggggtttatatggttatattatgttatatattatattgaggtttttattttattatagattgtagttgttgtttatgtggtttttaattggagagattattttgttgaataaagagattagtttgttttgggtatttttgttagtttaggtttttttataatatgaggggtagttattattatggttattatagagtttttagagtagtagttattaattagggttgtagattagaattttttgtgaagttttataaatggttaggtttt

SEQ ID NO: 2234 - DNA, 2124 bp, Artificial Sequence
  chemically treated genomic DNA (Homo sapiens)
agagtttagttatttgtgaagttttatagaaaattttaatttgtagttttggttaatagttattgttttagaagttttatagtaattatggtaatgattgttttttatgttgtggggagatttagattgatagagatatttagagtaggttgatttttttgtttaataaaatagtttttttagttggaggttatatggatagtagttgtagtttgtgatgagatgaggattttagtgtgatatgtggtatgatatggttatgtaagtttttaagttttttataggggagaatggtgatgttttggttttattgttaggtgtattggggaggatcgtatgttatttattaattgttgttaaattcgaattttttaagtaattttaaaatttatgtagttttaaaattatgatagggaatattattggagtttttgatatggatgaaagatttgggtaaaaattgtttagttaggattgttggtaatagtattttaataatattgatatgtagtagtgatttgggatatagttttattatgattttgtatagtttagaaatatgggggaggagtatttttattattatttattaatttagttgagattttagatatagtttaagaaataattttgttttttttttttttttttgatattaagaagaatagtttttgtggtttattgttttatttgtttttttttatgaaagttttattttttttattataaaatatttaatagtattattaaaaaataaatacgtatagagaacgaattgtttggattttttttttttttattttggaggttttgttgttgtttaaggttttaatagtttaaattatagaatagtttattaattattgaataatagaattggaaggaattttagggataatttagattagttttgggaggtgggttttagtagtttgttttaataagttttttaagtgattttgatgtatgttaaaattaatgaattattgaatttttttatgtgacggttaatgataggtttagagtattagtatttattttatttttaatgtaagagttagtttttaagttttatattagatttatgtttattttttattttgtgtgtgttttaaaggtgtttagagaaattttttttttttcgtatattattaatagatataggtagatatttttggtaggggaaagtgtgttttggagtgttagtaggataaaggtatattaaaaagtgaatgagttggttgaatttgttgttttataaagagttggaaagaaagttgttgtattaaatatttgtgaattgaattttgagtttttattattggtgttagttgtatttttttgtttttttgtttttttttttttaatttttatgatagtttattattgaatttttttgttttttaaagagataaaagttttgttttttttatatttttaaatttttgaatattaaaggaaatgagttttttagttgagatgtataagatttttaatttagagtttttatttttttaattgttatttagttgttttgtttatttggaagaaagtataaatttaattgtgttatagtgtaaataggttatagatgtgtaaggggagtttttattattggaagaatagaaatatttagatgtttgtgtatttgaatttttcgttatggtattgaagtattaattttggtgtgtaataaggtgatggtagtgtatagtagtatcgttttttattaattgaagggtttttgtttatattcggtttgttttttggattttaagtagtattatagttataaagtagtttttagtttataaggtgtttttataaataggtggtatttttattttttaaatgataaaattagggttttgaggcgggttagttgatttaaaggttattaggttggttttattgtttttttaaagtaattgtatttttttatagtatatagattaaaaaaatttgtgtatttgggttatatatttagtggttagaggttattaaagtttaggttaatgaaatgttttttattttgtagttatttagtttaatggattagatgggtaagatgagattttagttatatggcgggattaatttatattcgtagtaatagggatttgt

SEQ ID NO: 2235 - DNA, 1590 bp, Artificial Sequence
  chemically treated genomic DNA (Homo sapiens)
ggtcgtttttttagagggaggttaattagggaagttttgagttaggtcgttttggaaaaattatattgatttgtggagtttaagagaggttaggggataaatatatggtttagtatataggaaggtaggtgtgggtattgagtgatttgagggagaaatttttatttattatttattatgtggttttgttgtgataaattcgtgtggtagttatttatagtagatttataacgtgagaggttcgttgaaataagggtgttggtattggttatttagtttggttttttttgttttgcggggtgatttgtttggttttggtttttttgtgagttgggttttgttgggtggtttttagtgtgttagttttgaggttggtgagaggttaggttgtgaggtgtgaggaatttatttgcgtttttatggaaggtgtttttcgtatcgttgggttagatttgtttggttttgtagatgtttacgatggtggtttttgatacgacgattgggtagtgcggtgacgtttatggtattgcggcgtggtaggggtagaggggggaggttgtttttgtcggaggattgttgcgagttttgttagagagagtagtttttgtttcggaatatgaggtaggtggtggggtttggggatacgcggttggattggtcggagaagtttttttggtcggagggagttaagtgtttttgttttaggattgtaggattggtttagatttttgtattggaaaggtttttatggattagggagttcggtgttttttttacgggggatttttgggttgcgagttgtatagtttaattcgttgttgttagggttttagttttttaaaaggtatagggacggggggagggtggcggttcgatgggggagtcgtttttagggggttttttcgtttgtgtttacggcgcggtttttttaagaggttcgtttggtttcgttatcgcgtcgcggttattttttttcggtttttttttttttgcggcgtagagtgcgggtcgggcgggagtgcggcgagagtcggttggttgagtttagcgttcgaggaggcggcggcggcggcggcggtagcggcggcggcggggttgtggggcggtgcggaagcgagaggcgaggagcgcgcgggtcgtggttagagtttggcggcggtttggcggagcggagagtagcgttcgcgtttcgtcgtgcggaggagtttcgtatataatagcggcgcgcgtagttcgcgttttttttttcggcgcgtttcgtttcgcgcgtcgagcgtttcgtttcgttttatttgttattagggagtgggcggggattgttcgtcgtcgtcgtcgtcgcgcggggttatgggggtcgttcggcgttcggggtcgggtttggcgaggtcgtcgcgtcgtcgttgagacgggtttcgcgcgtagttcggcggcgtaggtaaggtcggtcgcgttatggtggattcggtgggtttcgcggaggcgtggaaggcgtagttttcggatttagagttttcgcgtatggagttgcgtttagtgggcgatatcgagtaggagttggagcgttgtaaggtttttattcggcgtttggag

SEQ ID NO: 2236 - DNA, 1590 bp, Artificial Sequence
  chemically treated genomic DNA (Homo sapiens)
ttttaggcgtcgaatggaggttttgtagcgttttagtttttgttcgatgtcgtttattgagcgtagttttatgcgcgggggttttgagttcgggaattgcgttttttacgttttcgcgaagtttatcgggtttattatggcgcggtcggttttatttgcgtcgtcgggttgcgcgcggggttcgttttagcggcggcgcggcggtttcgttaggttcggtttcgggcgtcgggcggtttttatggtttcgcgcggcggcggcggcggcgaataattttcgtttattttttggtggtaggtgaggcggagcggggcgttcggcgcgcggggcggggcgcgtcggggggaagggcgcgggttgcgcgcgtcgttattgtgtgcggggttttttcgtacggcgaggcgcgggcgttgtttttcgtttcgttaggtcgtcgttagattttggttacggttcgcgcgtttttcgtttttcgttttcgtatcgttttatagtttcgtcgtcgtcgttgtcgtcgtcgtcgtcgtcgttttttcggacgttaagtttagttagtcggttttcgtcgtattttcgttcggttcgtattttgcgtcgtaggaaggggagggtcggggggaggtggtcgcggcgcgatgacggagttaggcgggttttttaaaggggtcgcgtcgtgggtataggcgggggggttttttggaggcggtttttttatcgagtcgttatttttttttcgtttttgtgttttttgggaaattgaggttttaataatagcgaattggattgtgtaattcgtagtttaggggtttttcgtaaaaaagatatcggattttttggtttataaagatttttttaatatagaggtttgggttagttttgtagttttggaataggaatatttggtttttttcggttaggaggattttttcggttagtttagtcgcgtgtttttaagttttattatttattttatgtttcgggataagagttgttttttttggtagaattcgtagtagtttttcgatagaagtaattttttttttttgtttttattacgtcgtagtgttataagcgttatcgtattgtttagtcgtcgtgttagaggttattatcgtgggtatttgtaagattaggtagatttggtttaacgatgcggagggtattttttatggagacgtaggtaagttttttatattttatagtttggttttttattagttttagggttggtatattagggattatttagtagggtttaatttatagagaggttaggattaggtaggttatttcgtaaggtagggagggttaggttgagtaattaatgttagtatttttgttttagcgggttttttacgttgtggatttgttgtgggtggttgttatacgggtttgttatagtaggattatatgatggatgataaatagggattttttttttaggttatttaatatttatatttgtttttttgtgtgttgagttatgtgtttgttttttggttttttttgagttttataggttaatgtagtttttttaggacgatttgatttagaatttttttgattagtttttttttaagggggcggtt

SEQ ID NO: 2237 - DNA, 660 bp, Artificial Sequence
  chemically treated genomic DNA (Homo sapiens)
taatttagtatatagtggaaatttaatgtatgtttgataaattttttattttttgtaattttttggggtgggatagagacgagttttgggtaagaatattagtttttaaattttaggaaagtatattggatttagtgttatggaaagtggattatttttgcggaggttttttgaatttcgtagtatttaaggtttttaggttagttggattgtgttttgttataatttttatgtgtttatgaaaagaaaaaagaattttggttttaaatttaaattatttttttatttaggggaaatggttggtagaggagaaaataaacgattgcgatatgttacgaagaatgaggattagtaaagaggaaggagtttaggtaaatagtgttgttttatttttgttgttaattatttattgggttcgttaaaagtttttgtttatttatttttattaatcgtttttgattagttaattatatggttgaaatttagggattttttggtggagtaattattagttaattttagggtattatgataaattttgatttggggaggaattaggattatatagattaaggtagtttttttttttgagaaattattttagatattattatagagttttttgtttttttttaattattaaaggtcggtggattatta

SEQ ID NO: 2238 - DNA, 660 bp, Artificial Sequence
  chemically treated genomic DNA (Homo sapiens)
tagtagtttatcgatttttggtagttgaggaagagtagaagattttatgatgatatttgggatagttttttaaagaagaaaattgttttgatttatgtagttttggtttttttttagattagagtttattataatattttgaagttgattggtaattgttttattaaagagtttttgaattttagttatgtggttggttggttaaggacggttgatggaaatagatgggtagaaatttttgacgggtttaatgaatgattaatagtagaaataaagtagtattgtttatttaagtttttttttttttgttagtttttatttttcgtaatatgtcgtaatcgtttatttttttttttgttaattattttttttaagtggaaaggtaatttgaatttgaagttagaatttttttttttttttataaatatataagggttatggtaagatatagtttagttagtttggaaattttggatattgcgaggtttagagagttttcgtaaaaatgatttattttttatgatattaggtttagtatgtttttttggagtttgaaaattgatatttttgtttagagttcgtttttattttattttaaggaattataaaaggtggggaatttattaaatatgtattgggtttttattatgtgttgagtta

SEQ ID NO: 2239 - DNA, 1503 bp, Artificial Sequence
  chemically treated genomic DNA (Homo sapiens)
atgttgtaggttttgtatgaaaagtggaaagtttattgaattatatatatatttttaggatttagatgtttggtaacgtatagtagaatttttatgtaatggttagtattttttatatttttttgagtgttttatgtttgagttgatatattaatattagttttgttttagttttgtaaaatagattgatttgattttagaagttttaagagatattgaaaaagattaggaattttagaattgtattttggtttggtttttgtttttttttgaaaataagatttttttgttaagttggtattagttaaatatttttttttttttaattatacggatattgttttttaaaaggtttaaagggtagtggttttggtgtttggaatattttagagtatttaggtaattaatattttggttattatttaattatatttgaaagagaattaagtgagttttgtgtaaattaatgtgtatttgggtgagtttttaatattagatagattttataggttttagtttgtagatattttttattttaattttttgaatagatagttttatttttttaaggtaatatagtgcggtggtttttggttgagatgtttgttgttgttttttttattttgtttttgatgatttgttagtttggggtaattgtataggagaaggtgaattagtaagtgggttatatgtttttgtaaaatttgtacgtaggaattatttggtggggaattaagatatttttatgtttgtagtagaggttgtgttagaatggaaaataatttttttttatgttattattatttttgtggaggaggaatgggatatgtgaaaagatcgtgtatttggagttaaattggtttatgtgtaaattatatagttttaatgtttagaagttgaataattcgggtaaattattttatcggtttgatttttagtttttttagttgtaaaatgagaataataatattttttttataagagttaatgtagataaaataagattttgaatataaaatgtatttagtttatagtagatatttaataaatgatagtttttttgagtggtgttgaatagttaatttaatttttatttttttatttgtaaaagagtattataagagtgttgttttatagttttgggggaggataaaattagataatgtgtttaaaattattgtggggaaggtaaaggattatagagatgttgggttatttgattttaaaaatgattttattttttgttatgggataatagagggaggtgatgtagttttatatgtatattgtgttttatttattttatttttttgagatttttaagtttgttttatgggttttttttttggtattttaatattaagtattttgtggagtttaagtagttttttattttatttcgggatagttttaaagtaatttttgttttttaaatattaaagattttaaatagaattatttaattttaatttttgatagatgatgtaattttgaattattagt

SEQ ID NO: 2240 - DNA, 1503 bp, Artificial Sequence
  chemically treated genomic DNA (Homo sapiens)
attaatgatttaaaattgtattatttattaagaattagaattaaataattttatttaaaatttttaatgtttgggagatagggattgttttaaagttatttcgaagtgaaataaaggattgtttaggttttataaaatatttaatattaagatattaaaaaaaaaatttatgaagtaagtttggaaattttaagaaaatagaatgggtaaaatataatgtatatatgaaattatattatttttttttattattttatagtaaaagataaagttatttttagaattaaatgatttagtatttttatagttttttgttttttttatagtgattttgaatatattatttaattttatttttttttaaaattatgagatagtatttttatgatgtttttttatagataagaaagtaggggttaagttaattgtttagtattatttaggagaattgttatttattaagtgtttattataagttgagtatattttatatttaggattttattttatttatattaatttttatagaagaggtattattatttttattttatagttagggaaattaaggattaaatcgatgagatgatttattcgaattatttagtttttaagtattagagttgtatgatttatatatagattaatttgattttaagtgtacggtttttttatatgttttattttttttttataggagtagtaataatatgaaaagaggttattttttattttaatatagtttttgttgtaaatataaaagtgttttagttttttattaggtgatttttacgtgtaagttttgtagagatatatggtttatttattggtttatttttttttgtgtagttattttaggttgataagttattaaagataagatgaagaaaataatagtaaatattttagttagaagttatcgtattatattattttgaaggaataaagttatttatttaggaaattggagtaaaagatgtttataggttgggatttgtaagatttatttgatgttggaaatttatttagatatatattgatttgtatagaatttatttgatttttttttaaatatggttaaatagtaattagggtattgattatttaaatattttaaagtgttttaggtattaaagttattgttttttagattttttgaaaaataatattcgtgtggttaaggaaaggaagatatttaattaatattagtttagtaaagaggttttatttttaaaaggaggtaaaaattaaattaagatgtagttttagaatttttggttttttttagtgttttttggaatttttgaggttagattaatttattttgtaagattgaaataaggttaatattggtatattaatttagatataaagtatttagaaaaatgtaggaaatgttaattattatatgaaggttttattgtacgttgttaaatatttaaattttgaaaatatatgtgtaatttaatggattttttattttttatataggatttgtagtat

SEQ ID NO: 2241 - DNA, 2431 bp, Artificial Sequence
  chemically treated genomic DNA (Homo sapiens)
aaaatggaagtaataatagatttttagagtaatatttttttaaagatagtgtttaaatttggatattatgtttaggtgtaattcgattagtgaagagtattagtttagtttaagattgtagttttattcgggttttgaattgaattcgtttagtttttgggtgtttataaagttgtgtttgtagttaattaaaataaaatttaaggtattttgataggtattattattgagttatattttttattatttatattgttgggtgtttcggtttgagggaggattttatatttatttttattaattagattttgtttttttattggtgttttagtatttgtttagtttttttttttattttgtatttgagggaaaggaagttaaatgggtagaatttggttataatgaggatgtgtttgatatgttggatttgagtttgtgttttattgaagaaaagaaatggaaattttgttgagtatttattttatatagggtattttttttgattattttatttaatattttaaggattttttgaggtagatgttattattattttgtagagaagaaatttgtatttttatttgaagtttttaaatatggtaaacgatttaattttttgttttttgtttaatagtattttgtaaatattttattatgttattttatgtttttttatttttttttttttgttttataaataaatatataatttttttttttattttaaaaagaatttgaagtattttttgttttgatgtttattattttaacgggttgtataatgttttattaagttattttaatttatttaataaattttttattgttgatagtttggttttgtttgttttttgtggtttttaaaattattttttgtaataaatgattttgttaaaaaaaaaattttcgtacgaatattattttgttttggaaattttcgtaagggtggaatattgtattaaaggggataatatttttggtgtttttttatagagtttagtaaattgtttatttaaaggagtatgttttatttgagagtaaaaagttaaaaataaatatatataaaaaaattggttttttataaaagaaattaattttttatttatttataaaatattttagtgttgtgatgggtggtaggtatcgtgttaggggttagggataaggataagtaaggttaggttcgggtttttaagtagcgcgttgtggagtcgggtagagtagattaagtgtaataggtatttggttgtagttaggaaggatcgtacgttttttcgcgtaggagagtggaaggagggagttgtttgttagtatcgaggttttgcggtataggtaacgtttgatttgagttttgtagaatgagtaagagtttgggtacgcgatttgtatttattttattgtgaatttttggttttatattagaaaaaaaaaaaattgtgttattttcggtataaaaaacgttggtggcgttttaagcgttttaagtttttttttatcgttaaggagtaggggttagggaaaaggatagcgggaataggatttgagagtcgggaatttttggttcggtacgggagagggtaggagaggatttaagcgcggggttcgtcgttcgttggggattcgagtcggtttgtggttttcggggaatagaagacgcgtttttagcgattttgaagagttagttaagttttttgcgggttaaggagacggtgaaggaatcgggattaattggggtaggggttagaaggtagttcgcgagtgggttacgaggggagttgggttcggtagttggggatttcgagggggtaagcgggcgggagtaggagaggggcggagtttcggggtcggggtcggggtcgtagcggtcgtttagagggtttgcgggggttgttgtggtcggattcgaaggcgggcgtcgggagcgtagcgagttagacgcgtttttttaagatcgtgattttggtatagagagcggggttgcgcgtagttttgagattagattagagtttattttcgtggagatttacggtcgaggggtcggagttgtttttgtgcgagggagttttggtcgcggcgtaggtaggatcggggaatttaaggagggcgggaggaaatcgtttttggtgggggaggggtcgtggcggggtttgggggttaagggtttcgggtcgaattaggggtatacgtcggagtatttttagtttgggagtattgggcgtgaacgtgggggaaagtcgggattatattataggattaaggtttttttcggtttagaattggattgtttatttgtttttataaggggtatcgggtcgttttattttaattaagggagtttttatataacgttcgttgttggtagtttttcgttgtttttgttttgttttttgtttgttgatatatttcgtaaacggattcgtttggtttcgtt

SEQ ID NO: 2242 - DNA, 2431 bp, Artificial Sequence
  chemically treated genomic DNA (Homo sapiens)
aacggggttaagcgggttcgtttgcggaatatattaataggtaggggataaggtagaggtaacgagaaattattaatagcgggcgttgtgtgggggtttttttaattggagtggggcgattcggtgttttttgtaggggtaagtgaataatttagttttgagtcggggaaagttttgattttgtaatatggtttcgatttttttttacgtttacgtttaatgtttttaggttggaggtgtttcggcgtgtgtttttggttcggttcggagtttttggtttttagatttcgttacggttttttttttattaggggcggttttttttcgttttttttgggtttttcggttttatttgcgtcgcggttagggttttttcgtatagaggtagtttcggtttttcggtcgtgggtttttacgaggatgagttttggtttgattttaggattgcgcgtagtttcgttttttatgttaaggttacggttttggagaggcgcgtttggttcgttgcgttttcggcgttcgttttcgggttcggttatagtagttttcgtagattttttgggcggtcgttgcggtttcggtttcggtttcggagtttcgttttttttttgttttcgttcgtttgttttttcggggtttttaattgtcgagtttagtttttttcgtagtttattcgcgggttgttttttaatttttattttagttagtttcggtttttttatcgtttttttagttcgtagagagtttagttgattttttagggtcgttgagggcgcgttttttgtttttcgagggttataggtcggttcgggtttttagcggacggcgagtttcgcgtttaggtttttttttgttttttttcgtgtcgagttaggggttttcggtttttaaattttgttttcgttgtttttttttttgatttttattttttggcgatggaaagaagtttagggcgtttaagacgttattaacgttttttgtgtcgagggtggtataattttttttttttttgatataaggttagagatttatagtaaaataaatataaatcgcgtgtttaaatttttatttattttgtaagatttaggttaagcgttgtttgtgtcgtaagatttcggtgttggtaaatagttttttttttttatttttttgcgcgaaagggcgtgcggttttttttggttgtagttaggtgtttgttgtatttggtttattttattcgattttatagcgcgttgtttggaggttcggatttggttttgtttatttttgtttttagtttttggtacggtgtttgttatttattatagtattagaatattttatgaataagtggaaaattaattttttttgtagaaaattagtttttttgtatgtgtttgtttttggttttttatttttaaataaagtatatttttttgggtgggtaatttgttaggttttataaagaaatattaaaaatattattttttttaatgtagtattttatttttgcggaaatttttagaataaaataatattcgtgcggagattttttttttagtaggattatttgttatagaaaataattttaaaaattataaaaagtaaatagagttaaattgttaatagtaggaaatttgttgaataaattagggtgatttaatgggatattatataattcgttaaaatgataaatattaagatagaaagtgttttaaattttttttagaataagggagggagttatgtatttatttataaagtaaaaaaaaaaaaataggaaaatatgaagtaatatgataaaatgtttgtaaaatattgttaagtaaaaagtagaaaattgggtcgtttattatgtttaagaattttaaataaaaatgtagattttttttttgtaaaatggtgataatatttattttagggggtttttggagtgttaaatgaaatagttaaggaaagtgttttgtataaaatggatatttaataaagtttttattttttttttttaatggaatatagatttaaatttagtatgttaaatatatttttattatggttaagttttgtttatttggtttttttttttttaaatatagggtaggagaaggagttgagtaaatgttaaagtattagtgaaggggtaaaatttggttaataggaataaatgtgaagtttttttttaggtcgaaatatttagtaatgtaagtaatggaggatgtggtttagtagtggtgtttattaaaatattttagattttattttagttggttataagtatagttttgtgaatatttaaaggttgaacgagtttagtttaaaattcgaatgaggttgtaattttaggttgaattgatgttttttattggtcggattatatttgggtataatgtttaaatttgggtattatttttaagaaagtattattttgaagatttattattgtttttatttt

SEQ ID NO: 2243 - DNA, 3280 bp, Artificial Sequence
  chemically treated genomic DNA (Homo sapiens)
tagttggtcggttgtagcgttgggtgcgggtgtaggtttaggttttttttttacggttaaattagggggtgttaattttggtttgttttgtgtttttttgtattgtgtgggtgatttatgggttatgggtggttttagatttttgggtataaattgggttttagtagaaagtattttagaggattaggtaggttgggggttagttttgtcgtttatttttagattttgttattcgtttttagttagggagttttttttttgttttttggtttgtttcgttttaggttttgattttttttttgtggagatgtaggggtagtgggggatatagggacgttttgtttttagggtagtttttagggaggtagtgttggggaggggtaggtgagatcgttttttttatcgggtttatagtattattttggtttgaggtatcgtttttaggaagttttttttgagttttgagcgtttgcggttttttgtgtgttgttttttgtggggttttgtagatttagagaggtttagttgtattcgttcggttgggagagttgggtgtggggaatatggtcgggttttcgaggtttttgttgttgtttttgtttttggcgttggttcgcggtttgtttggggttttggttgtttaaggtaagagttttttaggttttttatggttatagtttcggagttttttttgttttatgagtttagagtttttagtttgagttatagtatagtttttaggaagcgggtggggtgttgagcggtttttagtgtttgaggatttatttaagagaaggaaaaagggtggattcggtggggagtggtcggggttgtttaggtagggtcgttgttttgggaggaagaagtttatagtttcggaatacgaggatagtattttttttaatattatagtcggtgtttagatttgttttatgtttcgtaaggtatcgtgtttttggcgatatgttagttttgggttgttttagggttttattatttttattattgttttttgtagggaggatattttttgtttttttggttagattgatggtgatagtttaggttttttttagaggtgtagtagtttttttattgtacgattgttttcgtgggagttttcgttaatattatttgttttattagcgggggtttgcgtgggatttatttgaggtagttcgggttatagttttaagatattatttattacgaggacggggtggtgtttattacggatagacggtttcggggtcgtatcgattttttagggttttaggataatttgattattattatgtatcgtttgtagttgtcggatattggtatttatatttgttaggttattacggaggttaatgtttacggtttcggtattttggttttggtgataggtagggaatgtgtttattttagattttttttttaattttagttgttggttaggttttgtttttttagtttttgtcgtgggatttttttttttatatgtgtttgaattgttttagtttttagtttattgtttttagtagttttttagatagttgtttttttttttttttatagtttttttttgtttcgaattttaaatttcgggggttttaataggttttttatcgggagaattttttttttttttttttttttttagaggaatagttttaaggatggtatagatgttcggacgttttattaagggtttttgttttttttgttttatcgataggtttcgttttttttgattcgtagatagtttttgttttttttgattcgttagtagtttttgttttttttgcggttttggcggtgatttttttttttttcgggttgggtttgggggtggcgtgtgtgttggcgaggatataggttagtgtgagttttagttgttatttgtattttaaagattgtttttttttttgagagtagcgtggggggcgttaaagttttagaggaaaattttggtattcgtcgttttttttgtaggttttggaatttttagggtggaagtggtttcggcggggagggagggggattagtattaaagcgatttgagggggagggagtagtttaggcgttgggttcgcgtgtgcgcgtgtgtcggtgtgtaggtgtgagtgtttgaggggggatttttgaggtttgtgcgtgtaggttggagtgtgcgggtagaggagggagcgtttaggcgtgggttcgcgtgtgtacgtgtgtaggtgtgagtttgtgtgtggggatttttgaggattgtgcgtgtatgttggagtgtgtcggcgtgttgtgtggtcgtgggaaggggagggggttttagatagatatagagtttaggcgtggttatttttttcggtttttgttgtttgtttggggttggagtgggggtttcgtttggtttgggtttggtgggggggtttaagttatttttattttttttttttagaggtattttagggttcgatttagttttgtttggggaaggttttgttgggaattttggggtttaggagatttgggggttagtttagaggagttcgtgggggtttcgtgttaaaattagaaagttgatcggagtggggtggggtttaggatattacgttggttattggttggagacggcggttttgttttttagataaagaaattgtgttcgtggcgggataagaattcggcggtatgtgtggtgtacgaggatatgtcgtatagtcgttgtaatacgttgtttttttttaattagtattagtgatttagtgggtttttgtacgtttcgtttgtggtttttttagtattttttttgttttattatgttttttattttgttatattttttattttgttgtttttttacggttgtagtagagtttgaagggtttagtcgtgtttagttttaagtagatatataggtagtggttaggttttacggtgttttttagtggataatgatgtttttttcgggaagttttttttgtttagtttacgtcgttatcgggaggaagtttgattgttttttggttgtatttttcgattatggttaaggagggtttttttgtgggatgggtttggtacgcggtttttttttgttagtgtcggtttatttattagtaggtttttaatttttaggtagttcggtagaggacgggaggagattagttttttatttagtcgtattagaaataaaggtttttgtgtttttttttttgatttttgtatttattttttagttagtaggagttagggagggagatggttgatatttcggattttttttaagttttcgtttggggttttgtag

SEQ ID NO: 2244 - DNA, 3280 bp, Artificial Sequence
  chemically treated genomic DNA (Homo sapiens)
ttgtagagttttaggcggaggtttggggagggttcgaagtgttagttatttttttttttggtttttgttggttgaggaataaatgtagaagttagaaaaggaagtatagaagtttttatttttggtacggttgggtgggggattggttttttttcgttttttgtcgggttgtttgggggttgggggtttgttggtgggtgggtcggtattgataggagagggtcgcgtgttaggtttattttatagaaaagttttttttggttatggtcgggagatgtagttaaaggatagttaggttttttttcggtggcggcgtgggttgggtagggaaggtttttcggaggaggtattattgtttattgagaagtatcgtggggtttggttattgtttgtgtgtttgtttggagttgggtacggttgggttttttaaattttgttgtagtcgtgggaggatagtagggtgaggggtgtggtagggtggggggtatggtggggtagggaaggtgttggggggattataggcgggacgtgtaggggtttattgggttattggtattggttgggggaggatagcgtgttgtagcggttgtgcgatatgttttcgtatattatatatgtcgtcgaatttttatttcgttacgagtatagtttttttatttgaaagatagaatcgtcgtttttaattagtggttagcgtggtgttttggattttattttatttcggttagttttttaattttaatacgagatttttacgggtttttttgggttggtttttaggttttttgagttttagggtttttagtagagttttttttaggtagggttgggtcggattttggggtgtttttgaagaaggagagtggaagtggtttggatttttttattaagtttaagttaagcgggatttttattttagttttagataaatagtagggatcgaggggagtggttacgtttagattttgtgtttgtttgaggtttttttttttttttacggttatatagtacgtcggtatattttaatatgtacgtatagtttttagagatttttatatataggtttatatttgtatacgtgtatacgcgggtttacgtttgggcgtttttttttttgttcgtatattttaatttgtacgtatagattttagagatttttttttagatatttatatttgtatatcggtatacgcgtatacgcgggtttagcgtttgggttgtttttttttttttaggtcgttttggtgttggttttttttttttttcgtcgaggttatttttattttgagagttttagagtttgtagaggaggcggcgggtattagggtttttttttggggttttggcgttttttacgttgtttttaggagagggaataatttttggggtgtaggtggtagttggggtttatattgatttgtgttttcgttagtatatacgttatttttaggtttagttcgaggaggaaggagattatcgttagggtcgtagggagggtagaggttgttggcgggttagggagggtagaggttgtttgcgggttagggagggcggagtttgtcggtggggtagggagggtagaggtttttggtggggcgttcgagtatttgtgttatttttgggattgtttttttgagaaggaaaaaagaaggaagggattttttcggtggagaatttgttagagttttcggggtttgggattcggggtagggaaaggttgtggaggggaggaggggtagttatttaggaggttgttgggggtagtgggttgggagttggaatagtttaggtatatgtaggagggagggttttacgataagggttgggggagtagagtttggttagtagttggggttgggaggggggtttgggatgggtatattttttatttgttattaggattagggtgtcggagtcgtagatattgattttcgtgatggtttggtaggtgtaggtgttagtgttcgatagttgtaggcggtgtatggtgatagttaggttgttttgggattttgagaagtcgatgcggtttcggaatcgtttgttcgtagtgggtattatttcgttttcgtagtaaatgatgttttggggttgtggttcgagttgttttaggtagattttacgtaggttttcgttggtggagtaggtgatgttgacggaggtttttacggggatagtcgtgtagtggggagattgttgtatttttggggaggatttgggttgttattattagtttggttagaaggatagagaatgttttttttgtaggggatagtggtggggatggtggggttttgagatagtttagggttgatatgtcgttaaagatacggtgttttacggggtatggagtagatttgggtatcggttgtggtgttgggggaggtgttgttttcgtgtttcgagattgtgggttttttttttttaaagtagcggttttgtttggatagtttcggttattttttatcgggtttatttttttttttttttttaaatgagtttttagatattggaggtcgtttagtattttattcgttttttgggggttgtgttgtggtttagattgggggttttgagtttatggggtagggagagtttcggagttgtggttatggagagtttgggaagtttttattttgggtagttagggttttaggtaggtcgcgagttagcgttagaagtaggggtagtagtaggagtttcggaggttcggttatgttttttatatttagtttttttagtcgggcgagtgtagttgagtttttttgggtttataggattttatagagagtagtatataggagatcgtaggcgtttagagtttagagagggttttttggaggcggtgttttagattagggtggtgttgtgggttcggtgggaggggcggttttatttatttttttttagtattgtttttttgagagttgttttgagagtagggcgtttttgtattttttattgtttttgtatttttatagggaggaggttaaggtttggggcggggtagattagaggatagagaagggattttttggttggggacgggtggtagggtttggaagtgagcggtagagttggtttttagtttgtttggttttttggggtattttttgttgggatttaatttatgtttagaaatttggagttatttatgatttatgagttatttatatagtgtagaggagtatagggtaggttagaattggtattttttggtttggtcgtggggaaggagtttgggtttgtattcgtatttaacgttgtagtcgattagttg

SEQ ID NO: 2245 - DNA, 922 bp, Artificial Sequence
  chemically treated genomic DNA (Homo sapiens)
agttttttcgtcgggttggaaggcgataatcgcgaaaaaggagggtgatttttttcggcgggggtttcgggtgatattatattttttaaatgcgaaattaggtttcgggtcggtcgaagggcgtaatttttttttttcggcgttttatcggttttcgcgcgttttttttcgcgttcgagtttcgagttaagtagcgttttggggagcgcgttatggttttattagtgatcgttttgtttttgtcgttggttttgttgtttcgtgagtttgagacgttcgggaaggtaggggatggggcgggcggggggcgggggcgcgggattgcgggtttagtttcgttgtttgtcgtttgtagacgtcgttaggtcgagttagtttcgggtgtcgtcgttggatcggatttggaatttgggcgagatagtggagttgaagtgttaggtgttgttgtttaattcgacgtcgggttgttcgtggtttttttagtcgcgcggcgtcgtcgttagttttattttttttttatattttttttaaaataagtttaaggcggtcgaggggttggatatttagcggttttcgggtaagaggttgggggatattttcgtttttattttgagcgattttcgtcgagagaacgagggttattatttttgttcggttttgagtaattttattatgtattttagttatttcgtgtcggtttttttgttaggttcgacgcgtcgggttgcggtattttttcgcgtggggtttggggtttattttaatttgttttttatatttgggttttgtttttaagttttttagcgtatttggaagcgatttagatattgtttttattttatagatatagtaaattgaggttaacgcgaggttgagtagggattggggatggttttttacgttcggtcgatttggattcgag

SEQ ID NO: 2246 - DNA, 922 bp, Artificial Sequence
  chemically treated genomic DNA (Homo sapiens)
ttcgagtttagatcggtcggacgtaaaaagttatttttagtttttatttagtttcgcgttagttttagtttgttgtgtttgtgaaatgggaatagtatttaagtcgtttttaggtgcgttaagaggtttgaaagtagggtttaggtgtggaaaataggttgaggtgaattttaagttttacgcggagaggtgtcgtaattcggcgcgtcggatttggtaggaagatcggtacgaagtggttgaagtatatgatggagttgtttagggtcgagtagaaatagtagttttcgttttttcggcggaagtcgtttagggtgaggacgaaggtgttttttaattttttgttcgagaatcgttgggtgtttagtttttcggtcgttttgggtttgttttgggagaggtataggaggaaggtgggattggcggcggcgtcgcgcggttggaagagttacgagtagttcgacgtcgggttggatagtagtatttggtattttagttttattgtttcgtttaggttttaggttcgatttagcggcgatattcggaattggttcggtttggcggcgtttgtaggcggtaagtagcgaggttgagttcgtagtttcgcgttttcgtttttcgttcgttttattttttgttttttcgggcgttttaaatttacggagtagtaaggttagcggtaggagtaaggcggttattggtaaggttatgacgcgttttttaggacgttgtttggttcgaagttcgggcgcgaggggaggcgcgcgggagtcggtggggcgtcgaggggggaaagttgcgtttttcggtcggttcggagtttgatttcgtatttggaggatgtgatgttattcgaagttttcgtcgaggagagttatttttttttttcgcggttgtcgttttttagttcggcgaggaggtt

SEQ ID NO: 2247 - DNA, 1244 bp, Artificial Sequence
  chemically treated genomic DNA (Homo sapiens)
aagtttgtatatatggaaagtagtagaattaggatgtaaatatatttttttattattaatattaatatttattttgttaataaaataatgagggggtttgagtaaataattttaacggttaattttattttttaattgagatattttttttttttttttttttttgagatagggtttggttttttgttatttaggttggaatgtagtggtgtaatttgagtttattgtagtttttgttttttgggtttaagttatttttttattttagttttttaagtagttaggattataggtatatgttattatgtttagttaatttttgtattttttgtagaaatagggttttgttatattgttaaggttgtttttaaatttttgggtttaagtagtttttttgttttagttttttaaagtgagttattatatttagtagttgagatattttttaattttgggttagggtaaagagaagttggaaggaaaatgggtgaaaataaagaagtttttagttatattgtagtttgtttatgttttttgttttgggatgtcgtagtggttgttttagttttgtttttttagttttagttttttttttagtgaaggagagaaaaagtgatttaataaagtgaggattgttagtttttggagtttggatttttgagattttatattgttttagttagtagtttttttttttagtagcgtggtattattttttgatttattttttagtgtgtttattagtgagagtggtttttaagggagagtgtgaagtatacgtaggtagtgttttatattatatttgttgagtttaaattatgggaggttttttttttagattttgtattttgaaagttgcgtatttgagagtttgcggtttggttgtagggatatatttaggggaaggagttgtaatcgtgtttggggttttagttaggttggtcggagtttttgttttcgttgttttgttgtttgttcggggtattaatatggtttagaagcgttttgtttgtattttgaagtttgagtgtgtttagtagttgttggtttgtttttaggaggttaagaagttagtttattgtttttatagttatttttttgtgggggttgttttgtttatttaggaggggagaatttttaaaggtaaaggtgggtattttagggttttttagtttagtagtttgggtggtgggttagaggaagatgtataggaagaggcgtagaggtataggtagtggtaagag

SEQ ID NO: 2248 - DNA, 1244 bp, Artificial Sequence
  chemically treated genomic DNA (Homo sapiens)
tttttgttattgtttgtgtttttgcgtttttttttgtatatttttttttgatttattatttaggttgttgggttgggggattttggggtgtttatttttatttttgaagattttttttttttgggtgagtagggtagtttttataggaaagtgattgtaggggtagtaggttgattttttggttttttgggagtaaattagtagttgttggatatatttaggttttagggtgtaggtaggacgtttttgggttatgttggtatttcgggtaggtagtagagtagcggaaataggagtttcggttagtttggttggggttttagatacgattgtagtttttttttttgggtgtgtttttgtagttagatcgtaggtttttaggtacgtagtttttaggatgtagggtttaggagaggagttttttatggtttggatttagtaggtgtggtgtaagatattgtttacgtgtgttttatatttttttttaggaattatttttattggtggatatattgaggggtgggttagaaggtggtgttacgttattggaaggggaagttattggttggggtagtgtgagattttaaaggtttaagttttaagggttgatagtttttattttgttaaattatttttttttttttttattgagggaagggttgaggttgaaagggtagggttggggtagttattgcggtattttaaggtaggaggtatgaataagttgtagtataattgagaatttttttatttttatttattttttttttaatttttttttgttttagtttagaattaaaaagtgttttagttgttgggtgtggtggtttattttaggaggttgaggtaggaggattgtttgagtttaggagtttgagaatagttttggtaatatggtaaaattttgtttttataaaaaatataaaaattagttgggtatggtggtatgtgtttgtagttttagttatttgggaagttgaggtgggaggatggtttgaatttaggaggtagaggttgtagtgagtttagattgtattattgtattttagtttgggtgatagagagttagattttgttttaaaaaaaaaaaaaaaaaaaaagtattttaattggagggtggagttaatcgttgagattatttatttaggtttttttattgttttgttggtaaaatagatattggtgttggtggtaaagaaatgtgtttgtattttggttttattattttttatgtgtataagttt

SEQ ID NO: 2249 - DNA, 1449 bp, Artificial Sequence
  chemically treated genomic DNA (Homo sapiens)
ttgtaggtgttttttgttagttttttgtgcgttgggttaagttgtttgatttgatttattagcgtggatatcgtgtatttttatatttcggtgtttttacgtattatttttggcgattatttatgtgtttattttttaatttattgatttttggaggtttgttttcgttatttttgatttttaggtattggataagtttttttttcgtttttttttttagtttcgcgtattttatttgtttcggggtattttcgtttgttttttttcgttcgttgtttgtttcgggatttgcgtgaagtttttagtttcgttattagttcggtaatcgttttattatcgtatcgttgcgggtggggttagcgcgtttttcggacgcgtggaggagggatggaagtgcgggggtgggggtcgcgtagtttttatttattttgttggttgcgggcgtcgtcgttaggagtattagtaggagcggtagtaggagtatttgcggtttgggggcggttcgggcgtttatggtgggcgcgcgtttagagtttgggcgagttcggggatttttaggtttttaggttatcgcgttttttgcgtagcgcggttttgggagttcggttggaaagttcgtttcgttattcggtcggggcgggttttgtagggttcggtcgcgcggttcgtttttttttatttaggttttttggttgtggttttaagggagggaagacgtggtttaggtttcgtttttatatttttttttttttaatttattaggtagtgttttttttattcgggtatcgtgtttaggaggcgagaaagggttgggcgtttgaggggtaggtgggcgcggatttagggtaaggggttaaggaggtgatgtttttaaggttcgggggtttaggcggggaagtggggtgcggtcggaggtggggcgtttgggggtgtgcggtggggaggtggttgcgcggtggggaggtggttgcgtagggtggagggagtggttagcggttttgtttagattaagcgggaggcgcgtcgggcgtttgtattcgggaggtttcgtttgtttttcgcgttcgcggcggttcgcgtttttcgtttttagttcgtttttaatttgcggtcgtcgggtttggttgcgagagcgtcgcgaagaggtagcggggcgcgggtggattggggttggaggtgcgcgtttcgtggggtggtaaggcggtagtttttggcgttgcgggcgtttttataggtaaggcgtttataggtggggtaatcgttgtttcggggtttcggtatttgtttgggaggggtagtggagggagcgtggtatttaaggggtggtggcgggtttagttggggagttgtggttcgggggttattagaggagagcgcgtttggtttttgggtttgtttgtttgggttttaattgggtgttgtgtgttttgattaatttggaggttcgag

SEQ ID NO: 2250 - DNA, 1449 bp, Artificial Sequence
  chemically treated genomic DNA (Homo sapiens)
ttcgagtttttaaattaattaaaatatatagtatttagttaaagtttaggtagataagtttaggagttagacgcgtttttttttggtgattttcgggttataattttttagttgggttcgttattattttttgaatgttacgttttttttattgttttttttaggtaggtgtcggggtttcgggatagcggttgttttatttatgggcgttttatttgtggggacgttcgtagcgttaggagttgtcgttttgttattttacgggacgcgtatttttagttttaatttattcgcgtttcgttgttttttcgcggcgttttcgtagttaagttcggcggtcgtaagttggaggcgggttggaggcggggaacgcggatcgtcgcgggcgcggggaataagcggggtttttcgagtgtagacgttcggcgcgtttttcgtttaatttgggtagggtcgttggttattttttttattttgcgtagttatttttttatcgcgtagttatttttttatcgtatatttttaaacgttttattttcgatcgtattttattttttcgtttgggttttcggattttgggagtattatttttttaattttttattttggattcgcgtttatttgttttttaggcgtttagttttttttcgttttttgggtacgatgttcgggtagaagggatattgtttggtaagttgggagggagggggtatgagggcgggatttgagttacgtttttttttttttgaagttataattaaaaagtttgggtggggagggacgaatcgcgcgatcgagttttataaaattcgtttcggtcgagtggcgaggcgagttttttagtcgggtttttagagtcgcgttgcgtaggagacgcggtggtttgagagtttgagggttttcggattcgtttaggttttgagcgcgcgtttattatgagcgttcggatcgtttttaggtcgtaggtgtttttgttgtcgtttttgttggtgtttttggcggcggcgttcgtagttagtaaggtgagtgggggttgcgcgatttttattttcgtatttttattttttttttacgcgttcgggggacgcgttggttttattcgtagcggtgcggtagtggagcggttgtcgggttagtggcgaggttgagggttttacgtaggtttcgggataggtagcgagcggaagggagtaagcggggatgtttcggaataggtggaatgcgcggggttgggggaagaggcgaggagggggtttgtttagtgtttaggagttagggatggcggggataggtttttagaggttagtaaattaaaaaatagatatatagataatcgttagggatgatacgtgagaatatcgggatgtggagatgtacggtgtttacgttggtgaattaaattaagtagtttggtttagcgtatagagggttggtaggagatatttgtag

SEQ ID NO: 2251 - DNA, 3732 bp, Artificial Sequence
  chemically treated genomic DNA (Homo sapiens)
ttcggattttgttacggatgaattgggtaagttttttattttttgtggtttttgatttttttatttgtggatgggagagatgttagtattttttatcggtgtatgagaattgatgtacgtgtgggtgaagagtgtgaggtaaaagttttaagatgtggttgatatttttagtttggtaatatagttcgaattttgattggtattgtcgggttattttgttatagtttttggttgatatattaggtcgttaagtttggggatttttttttgagttttttggtgggatagaaatttatttttttatttaatttaaggtttagatgagggtggaaatttatatttgatagttttttaagttatcgtattatttgttttttaagagaggataaagtgtatttgttatggttgtttgagttgtaagattgagttattttattattgttgagaagttaattttgggggattttggggtggttatttgagtgttagtttttaaggcgttagttgtgttaatttagggtaaagtttagatgttggttgtgagttataggagggtttgttgattggtacggatgtgtatatgggattgttagaaaggaattttatttgtgtttggggaaaaagaagttggaattagaaagtttttatttttttttgataattaggttatggtttgtgttagtatttttagtttttaggggtgaagttggttttgttggtaggggcgggggtattttaaggattaagtatagttggggttggcgcggagtttggggtttgatggaattttttatttattgaagtttatagggaaagtaaagggttagtggttgtaggttaattaacgtatagatacgtatataggtatatatataaatatatatatgtatataatttatatatatttttgtttgattatatatgttttatataagttgtaaaataaaataaaattaataaggaaataggttagaattaatatttgttttattgaatgtattttaagtatttttttacgtttgtgtgtgaagagttttttattttttttttgcgaaatatttgatatttatgtaagcgtatgtggtagatatggagattaaaagttttattattaagttagtaatagcgatttattatttagtttcggagtttgttatggttattttggtaaatttaatttcggacgttttttttattttttgtttttagaatggtgagaattaaagagtatttggggaattttacgtttagtttggagatgtaattggagaggggagttttagttttgtttggtatttttggttaaattgtttgtttaaagggaatggggatggtttagggtttgtaaatcgtttttaatttattttgattttttttttttaaaaaattagttttgtagtttttggggaaggggtgtgggttaggttttaggaggttgtgtagggaggttaggtttggggaagttggagggagagacgtttatttattatttagagattggcgggttttttgttggaggagatttcgaggggtttaaagaagttaggtaggagaattagggttttagtttagttttttttcgagagtagtcgattaggaatgttttttttttgcgttagttgttatttttaaggggatgttttttttggttttttttttattgtagaggggttattagggagtgggtaggagtgaggggtgagagtttgggggtcgtagagttaaatttcgtttgattaataattttagatgttttcgtttaagtatatggaggtttcgggagtttttgggaagttagattttagttcggtttcgtgttaatttgtagttaggaggtaggttttcggttcgggttgatacgtaggttatagttttgggcgttttgatttggttggatgggaagtttagtttttatttagaagaggagttttgaatttttttacgttaaagaaaaagttaggcggggtaaattgtaattttttttttaattcgaagtgattaaatttcggggtttttttgtattggtttttggagtatggttaggtgcgggtatttggggtgggaatagtggggggattagggtgggtttttgggtttcgaggtcgttttaggttcgttcgtttatcggtttttagagaaagaatagggggtcgcgttcgttttacgttcgtttcgtttcgggttagtttttttttcgttgcgattcgttcgttgtttttattttttcgttcgcggcgtttagtgggaggcgggggttggtttcgtcgagtttagcgtcgggttttgatttgttgcgggcgttggggatcgatagttttcgcggttgttttttaggagagagggagggaggaaaagggggaaaaaagtgttcggcgtcgaaggcgaggttcgtatttttcgttttcgcggttggcgtaggattttattcgagcggagcgtttacggggagcgggtcgcggggcggcggcggcgaggaggaggcgagaaggagttggaggaggaggaggaggaggcgagggcgagcgagtttagcggggtttcggtcgtttcgcgggttaaagtcgagttttttcgttcgtgggcgagcgcgttagtcgttttttttagaatagtcgtcgttataaagaagaacggggggtgtcgaggtttttatgattttttaaagtggtgcggtttttgttgagtgcgttgttcgggtcgtgattcgcgtttttgtgcgttttcgcgcgttttcgagcgtttttgtgcgtttcggttcgcgtttcgtcggtatggacgtttatattcgttggaaagcgcgtagcgcgtttcgttcgggcgtttcgttgttgttttcgttgttgttgttgttgttgtgggcgtcgttttcgagtcgcgtaggtaagggcgtttcgggggcggggttgcgggatggggcgtagttcgggcgtcgttgttattttcgggcgttttcgttcgtagaattttttttttttggtttgtggaatgtacgggttaagattacgaatgttatttgttgggggttttttcgagatgacgatacgtagatataatgttcgcgggcgcgtcgtcgttttttttttagacgggcgggtcgggtggggatgtcgcgcgagtcgaggaaggatcgagggttggattagtaggaggggttgtttacgaggcgggtaaatttttgttttaaaaattttttttttttgttttatattataggcgtttagtttgggtttttatagttttatagtagaattttttttgttttaaatcgggtagggtcgttttttagagttatagttttttaaatttcgggatttttggggatggggggaattttagaagtttgggtttttagtattgaattttttttaggtattgttattttaggttgagttggcgttttgttttttttagggatagcgttttttgtagttttggttatttaagtgttcggggggtattggggattttgtagggtggtagatagttttgtttttaattttatttttaaattttttgatttttggaaggtagttttttttggattcgttgttgagagatgggatgcgtggagtaaagttagagatgggtttgtaggcgggggttgtgagtggttgggatgatatgtagatgtgggattttttttgttaagggttagtttttagaaggaggtttgtttttcggggagggcgttttaaggcggggattgtttgcgtttttgtttgggttttcgag

SEQ ID NO: 2252 - DNA, 3732 bp, Artificial Sequence
  chemically treated genomic DNA (Homo sapiens)
ttcgagaatttaggtagggacgtagatagttttcgttttgaagcgtttttttcgggaagtaagtttttttttaagggttgatttttggtagaaggaattttatatttgtatattattttaattatttatagttttcgtttgtaagtttatttttggttttgttttacgtattttattttttagtagcgaatttaggaaaagttgttttttagggattaagaagtttgggggtgggattaggagtagggttgtttattattttgtagggtttttagtgtttttcgaatatttaggtgattaaggttgtaggaaacgttgtttttggggaaagtagggcgttagtttagtttagagtgatagtgtttgggggaagtttagtgttgggggtttaggtttttgggattttttttatttttaggagtttcgggatttgaagggttgtaattttagggggcggttttgttcggtttggagtagaggaagttttgttgtagggttgtgagggtttaagttgggcgtttgtgatgtgggatagagaaggaaggtttttgggataaaagtttgttcgtttcgtggataattttttttgttgatttagttttcggttttttttcggttcgcgcgatatttttattcgattcgttcgtttggggagggggcggcggcgcgttcgcgggtattgtgtttgcgtgtcgttatttcgggggggtttttagtaaatggtattcgtggttttggttcgtgtattttataggttaaggaagaaaagttttgcgggcgaaggcgttcggggatgatagcggcgttcgggttgcgttttatttcgtagtttcgttttcggggcgtttttatttgcgcggttcggaggcggcgtttatagtagtagtagtagtagcgggggtagtagcggggcgttcgggcggagcgcgttgcgcgttttttagcgggtatggacgtttatgtcggcggggcgcgggtcggggcgtataggggcgttcggaggcgcgcggggacgtataggggcgcgggttacggttcgggtagcgtatttagtagggatcgtattattttaggaggttatggggatttcggtatttttcgtttttttttgtggcggcggttgttttggaaggggcggttggcgcgttcgtttacgggcgggagggttcgattttggttcgcggggcggtcgggatttcgttgggttcgttcgttttcgttttttttttttttttttttaattttttttcgtttttttttcgtcgtcgtcgtttcgcgattcgtttttcgtgggcgtttcgttcgagtgaggttttgcgttagtcgcggggacggagagtgcggatttcgttttcggcgtcgagtattttttttttttttttttttttttttttttttttggaaggtagtcgcggaggttgtcgatttttaacgttcgtagtaaattagagttcggcgttgggttcggcgaggttagttttcgttttttattgggcgtcgcgggcgagggggtggggatagcgggcgagtcgtagcgaggaaggggttggttcggggcggagcggacgtggggcgggcgcggttttttgttttttttttgagagtcggtaggcgggcgggtttggggcggtttcggagtttaggggtttattttggtttttttattgtttttattttaggtgttcgtatttggttatgttttaagaattagtgtagaggggtttcgaggtttgattatttcgggttaaaaagaaagttgtagtttatttcgtttaattttttttttaacgtggaggagtttagagttttttttttgggtggagattaaattttttatttagttagattagggcgtttaagattgtggtttacgtgttaattcggatcgaggatttgttttttaattgtagattggtacgggatcgagttggggtttgattttttaagagttttcgggatttttatgtgtttggacgggaatatttggggttattaattaggcgaagtttggttttgcggtttttaggtttttattttttatttttgtttattttttggtggtttttttgtaataaaaaggaaattaaagaaggtatttttttgggagtgatagttggcgtagggagaaggtatttttgatcggttgttttcggagaagagttgagttggggttttgatttttttgtttggtttttttaagtttttcggggttttttttagtaggaggttcgttagtttttgggtggtaggtgggcgtttttttttttagtttttttaggtttggtttttttgtatagttttttgaagtttgatttatattttttttttaagggttgtagggttagttttttaaaaggagggaattagaatgaattaagaacgatttgtaaattttgggttatttttattttttttgaataaataatttagttagagatgttagatagggttgggatttttttttttagttatatttttagattgggcgtgaaattttttaaatgttttttaatttttattattttggaaataggaggtgagagaggcgttcgaggttaggtttgttaggatagttatggtaggtttcggagttgggtgataggtcgttgttgttaatttggtgatgaggtttttagtttttatatttgttatatgcgtttgtatagatattaaatatttcgtaggaaaagaatgagaagttttttatatatagacgtggggaggtgtttgagatatatttagtaaagtaaatgttagttttgatttgtttttttgttgattttattttgttttataatttgtataaggtatatgtgattaggtaaaaatgtgtgtgagttgtgtgtatgtgtgtgtttgtgtgtgtgtttgtgtgcgtgtttgtgcgttggttaatttgtagttattggttttttattttttttgtggattttaatgagtgagaaattttattaaattttagatttcgcgttagttttagttgtgtttggtttttggagtgttttcgtttttattagtaaggttagttttatttttgaagattaggggtgttgatataggttatggtttggttattagaagagagtggaggttttttggttttagtttttttttttttaagtataagtggagtttttttttgatagttttatgtgtatattcgtgttagttagtaagtttttttgtaatttatagttagtatttaaattttgttttgaattaatataattggcgttttaagagttgatatttaagtgattattttaaggttttttaaagttgattttttagtaatggtaagatggtttagttttgtagtttaagtagttatgatagatgtattttatttttttttggagagtaagtggtgcggtggtttggaaagttgttaaatgtgagtttttatttttatttgagttttgagttgggtggagagatgagtttttattttattaggaaatttagagagaagtttttaaatttggcggtttgatgtgttagttagggattatggtagaatggttcggtagtattaattaggattcgaattgtgttgttaagttaagaatattagttatattttaaggtttttgttttatattttttatttatacgtgtattagtttttatgtatcggtagggaatattggtattttttttatttatagatgaggaaattaggggttatagagggtaggggatttatttagtttattcgtgatagggttcgga

SEQ ID NO: 2253 - DNA, 660 bp, Artificial Sequence
  chemically treated genomic DNA (Homo sapiens)
gagttttagtttgggtaatagagtgaaattgcgtttttaaaataataataataaatttttaaaagatatgtattattttggagattttaaggattttaggagttgtaagttaggatattagggtaaagaaaaaatatatatgttataatattatgtaatttaatttttttttgggatttgttagagttatttgattattttgaagatttttatttgtgttattgattaacggtttggttgtttttggatatgtttttttttttaagattttttgaagatggttttagaagggttttaaatttagttagttttttttaagtttaggttggttttgttttagattgcgattttttttttttgggtttaaggttttgttttttttttaaagatttaagatttttaaattttgtggttgttttgtttagttaaaaggggaagaagaggattagtttaaggaggaggaagaggaaaataagataaatagttagtgtagaggagaggaacgtgtgtttagtgtttcgatttttgcggagttagtagttgagagttttgtgttttgggtattttgtagttttgtatttgtttgttatttttttatcgaggttatgggtttaggagttttgttgtttttgttggtggttatagtttggtatggtaaga

SEQ ID NO: 2254 - DNA, 660 bp, Artificial Sequence
  chemically treated genomic DNA (Homo sapiens)
ttttattatgttaagttgtggttattagtaggagtagtagaatttttgggtttatggtttcggtggggaagtggtaggtaggtgtagggttgtaaggtgtttagggtatagagtttttagttattagtttcgtagggatcgggatattggatatacgttttttttttttgtattggttgtttgttttgttttttttttttttttttttgggttgattttttttttttttttttagttaggtaaggtaattatagagtttggaaattttgggtttttaagaagaaaataaagttttgaatttaagagggaggggtcgtagtttggggtagggttagtttgagtttggggggagttagttaagtttggggtttttttaaagttatttttaaggggttttgggagaagagatatgtttaagagtagttagatcgttagttagtagtataaatgagggtttttagagtgattaggtggttttggtagattttaaagagaagttaggttgtatgatattgtgatatatatattttttttttattttgatgttttggtttataatttttaaaatttttggaatttttaaagtaatgtatattttttaaaaatttattattattattttagagacgtagttttattttgttgtttaggttggagttt

SEQ ID NO: 2255 - DNA, 687 bp, Artificial Sequence
  chemically treated genomic DNA (Homo sapiens)
cgaattttttaggaatttttgttgtttgtttttttagttatttattttttaaaaaggatgtatgttagtggatagaatagggtaaatttattcgaaaaagaaataagaaataattgttagtgtgtttataaatgatatgaattaggagtggtgcgaagaggatagggaaaaaaaaattttatttggtgttggaaatattgcgttttttttttttttttttttttttttttgcgagttggagtgtgttagtttttttagacggaggaatgttgagtgttaaggggttaggattaattcggtgtgagttgatgaggtaggaaggtggggaggaatgcgaggaatgtttttgtttgtgtagattttatttagtttattggcgagcgcgtcgttcggagcgtataaaagtttcggtcgttcgttttaaatttatataataattttttcgttgagaggagatagttagtgcgattttattttttagttcgacggtagtcgtttcggtcgatagtttcgagacgatagttcggtcggtttcggtttttattttcgattatcgttagcgttttaggtttcgcgtttttcgttcgtcgttatcgcgttttttcgttcgttcgtagtgttaattatgatcgtcgttagtatgggtttcgttcgcgtcgttttcgtggtttttttcgttttttgtag

SEQ ID NO: 2256 - DNA, 687 bp, Artificial Sequence
  chemically treated genomic DNA (Homo sapiens)
ttgtagagggcgaggaggattacgaaggcgacgcggacggggtttatattggcggcggttatggttggtattgcgggcggacgggagggcgcggtggcggcgagcggggagcgcggggtttggagcgttggcggtggtcggaggtggggatcgggatcggtcgggttgtcgtttcggggttgtcggtcggggcggttgtcgtcgagttggagggtggagtcgtattggttgtttttttttagcggaagagttgttgtgtgagtttggggcgggcggtcgaggtttttatacgtttcgggcggcgcgttcgttaatgagttgaatggagtttatataaatagggatatttttcgtatttttttttatttttttgttttattaatttatatcggattgattttgattttttgatatttagtattttttcgtttgaaaaagttggtatattttagttcgtagaaaaaaaaaaaaaggaaaaaaaaaagcgtagtatttttagtattaaatagaatttttttttttttatttttttcgtattatttttgatttatattatttataaatatattggtaattattttttatttttttttcgaataagtttgttttgttttgtttattgatatatattttttttaggaagtaggtagttgaagaggtaaatagtaggaatttttaaaaaattcg

SEQ ID NO: 2257 - DNA, 4920 bp, Artificial Sequence
  chemically treated genomic DNA (Homo sapiens)
taattttgaattttgttttttgtatttaatgttttataagtatttttttatgttattaaaaatttttttaaataatatttacgatgtttatatggaattttagatgtggatgaattaaaattttgttaattattttattaatagtggttatttagggatgtttagatattttattatttaaaaaaaaatgtttttataaatatttttgtggtataagtttttatgagtggagttattgttttgaagtttttgttgaatagaaaatgttttttagtgaggttgttttaagttatatttttattagtgataagcgagagatagttggtttttttaaattcggagattaaatattatttttgaaaaaaaatggatttttgtttaatttggtagttattaaatagtattttattgtttttttaattatttgtttttttttagtagagatttttaaaaagatttgaaaggagtttttagataaaggaaggagtttttttttgtttgtttataattaataaatatttattatgtaaattattttgtttcgagtttttttttttttttttttttggatagatttgggagattttattttttaggttttagatatcgtgtagggaggagttttgaggtagggtgtagtttacggtttaggataaaatatattgattttgttattattaggttttgtgaaaagtaagttatgaaaacgttttgaaattttagatttttagtagataggatttatcgtgtttataaaaatatgaagatttttaagttttattaaagattcgaaaaaagtaaaagtgtttttacggttttatttttatttttattttttatcgttatcgtttattataaaggatattataaaggatatagatgaagagatacgtaatgtaaggtttgtgagaaggggcgtggagttttcgaaattttttttagttattattttttaagaatttggagtttttttttttttttttaattttataaatgtaatattagaattgattttatttggttattagtgtgtgttttaattcgttcgtttttgagagttttatttttcggttcgggatattattttttttgtgttagtgaaagtgtagagtagatgagaatttttaattattaatattagggaggggttttagataaagggggtaagttatgttttgtagagaaaaggttttttgttttcgaattatttttggaatattttagtaaatgtttttttttttgatatagaaaagagggatcgtgtgtagagtgtagtttgggtaattttttttttcgggattatttcggggtaggggtttttggggttcgtgtcgcgacgtacgcgtttcggttttagttattttcgtagcgggttatttcgtttgcggacgtagtttttcggtttcgttttatattcgttttttcgttttatttagttttcgcgtcggagggaagtggcgcgagggggaaagtattgtttgcgcgtttattgtaaattttagttagtttgagatcgttttaaacgtttgatttttatttttatttcgtttcgtttagttttttaatttaatttttgattcgtgttaaagtttgttttttgtttaaaatcgtggaagacgtcgagtatggggatcgaagatttgggtttaagttcggtttggaatttttgtttatttttggtattttattttttcgggtttatttgttggttttttcgaatgcgggttttgtttggtttacgttggatttttaacgtttagaatagtgcgtggtacgtagttcgtttttttataaatatcggattaaatgtatttttgtgatggtaatatttatacggtgttgtgagaatgaatgagtgattttgtgtaagtttttagtgatttgttataaaaagtattggtcgttaaattatttttataataaagtatatttttaggataataaagtattattcgcgaattggttatcgttattatgaaattattgagtaatatatatttatatttgattagtttttagaattatgttaaattttatttttttttgaaagtattttttaattatttgtatttgattttagtgatgttgtgaatgtgtaagtatagttatatttttcgaaggaaaggatttttattttttttattttttgaatgggttgcgtttgttgaaagcgcgggggaatgggcggttggaagtttggttttatttttagtattgtcgtttattggttgggttattttagtaagttattttttttttttgggttttagtgtttttattgtagtatttttaggtttggaattttatttattttagtaaggatggacgcgttatagagagacgcgtttttagttcgcgttttttatttgtttttaggcgtatttcgttttttttaaatttaggaaatgtttttgggaggttttgttcggtttcggatttattatcgattattcgtaaatagtagggttttttgggttttttaagtcgcgtattttttcgtttcgtttttgcgtttttttttttcgcgtttgttttttttttttatttcgtttttttttttttcgttttagcggcgtatgcgtcgcgttcggagcgtgtttttataaaagttcggtcgcggttagaaattttagtttgttggttgcggtagtaggtagtaaagtgacgtcgagggtttgagtgttttagtagttatcgtatttggagaattagcggttattatggaggggattagtgtaagtttagttttaatttgttttgttataaatgtataaacgtttgaatttagagcgtagttttttttcgagcgggtagaagcggttaggatattggaggtattcgtattttaaaaaagggttatcgaaaggagtttttttgattatgtttatatagtgcgggtgggtggggggggagtaggattggaatttttttttttgtgagtcgaggagaaacgattggaaagagcgttttagtggttgtatgtgttttttttttgagtttcgtcgcgcgcggcggtttgtacgttgtttgtaaacgtaagaatattttgtgtataagtgtagagaaggcgtgcgcgttgtttcgggatttagattatcggttttttttttggggaagcggggatgttttggagcgagttatattgtttgaatttagaggcggagggcggcgtgtttgggttgagtttttaggaggagattgcgttcgttttaatttcggggttaagcgtttggtgattgtttttgatattgggtgcgtgtttgttaaattttgtgcggtcgacggagttgtgttagttttttagtatagtaggtagagggcgggagaggcgggtggatttatcgcgtcgattttttgaggggatcgagtggtggtagtagttaggagttgattcgttcgcgcgttttgggtttgagggggaaattttttcgtcgttcgaagcgcgttttttttttacggtcgcgagtgggttttgtagttcgagagtttggggtcgtgtagaggttagcggagtggtttgattttttttttgatatcgcgtagttgttagttttgagatttgcgtttcggggataggagcgggtacggggtgaggggcgggggcggttaagatcgtatttgggttgttaggtcgtcgtcgcgaagattggtaggtgtaagtggggaaatcgtttggtttttttcgagtttagttgtgatgtttaatcgtcggtggtttttagaaattttttgaaatttttttgttagggagtttttggttttttgtagcggcgcgtaatttaaagacgttcgcggcggagtcgtttagtcgttttttagtattttgtgggatagagtttggcgtgtcgtttagcggagtttttgtagcgttgtttgcgggcggttggcgtgggtgtagtgggtagtcgcggcggttcggggttggacgattcggtttttcgcgtgtttatcgtttggaggtttttagttgtttattttcggtcgggttaattggattagtggcggggtaatgggaaattattcgggagagtgaggaaatgaaatttggggcgaggattacgggtgtagatttcgttattttttttatttaggaaaatgtttcgttttttaacgttttaaacgcgttaagtgataaatacgaggatggtaagagatttatatatcggaggagcgttcgtttgggggaggaggtgtcgtttgtttattttttgatattttcgtttaatatattttaagtatcgaagggttttcgttttaagatcgtattttttttatttattataagttgtttgaagtttagaatggtttgtatttaggtaggcgtgggaaaattaagtttttgcgttttaggagaatgagtttttgtaacgttttcgtttttttttcgtgatttttttttttttttttttttttttttgggcgaaaaattttttataaaaagttaattattgttttttttagtagtatttattttattttttacgtcgtttgggagtggtttttttgtgtgtattttttttttttttttaaggaaggtttttttttttttttttagtgggcggggtagaggagttagttaagatgtgattttgaaatttttagcgttttagtgtttttttgttttaaataaagaattttgtaattggttttattaaagaaggatataatgaagttattatgggaaaagatggggaggagagttgtaggattttatattaatttttttgtgtttttagtttattattttagaattttttgaagaaagtaagtttgaattggttttttaaattgttttaaaaaatttttttaattgggttaatgtttgttgaattggaagtgaatgtttatttttttgttttttttgtagatatatattttagataattatatcgaggaaatgggtttaggggattatgattt

SEQ ID NO: 2258 - DNA, 4920 bp, Artificial Sequence
  chemically treated genomic DNA (Homo sapiens)
gagttatagttttttgagtttattttttcggtgtagttatttgaagtgtatatttgtaaaagaggtaaaggaatggatatttatttttaatttagtaagtattaatttagttaaaaaaattttttaaagtaatttaaaaaattaatttaggtttgttttttttaggaaattttgaagtagtgggttaagggtataagagaattaatgtagaattttataatttttttttttatttttttttatagtgattttattatatttttttttggtagaattaattataaaattttttgtttagaataaaagggtattgagacgttgagggttttaaagttatattttggttaatttttttgtttcgtttattagagggaagaaaaaaaattttttttaggaggaaaaaaaaaatatatataaagaggttatttttaggcggcgtggggggtggggtgggtgttgttaggaggggtagtgattaattttttgtaagaagtttttcgtttagggagggaagaggggagaagggaggattacggggggagggcgggggcgttgtaaagatttatttttttaaggcgtaaaaatttaatttttttacgtttgtttaaatataaattattttgggttttaagtaatttgtagtgggtaaagagaatgcggttttaaaacgaaggtttttcggtgtttggggtatattgggcgggagtgttagaaaatgaataaacggtatttttttttttaagcgggcgttttttcggtgtgtgggttttttgttattttcgtgtttattatttggcgcgtttgggacgttagggagcggggtatttttttgggtggagaaggtaacggggtttgtattcgtggttttcgttttaagttttatttttttattttttcgggtggttttttattatttcgttattgatttagttaattcggtcggaggtgggtagttggaagtttttaggcggtgggtacgcggggggtcgggtcgtttagtttcgggtcgtcgcggttgtttattatatttacgttaatcgttcgtaagtagcgttgtaggggtttcgttgggcgatacgttaggttttgttttatagggtgttggggagcgattgggcggtttcgtcgcgagcgtttttgaattgcgcgtcgttgtaggaaattaaaaattttttagtaagagggttttaaaaggtttttggaaattatcgacggttaaatattataattggattcggagagagttaaacggtttttttatttgtatttgttagttttcgcggcggcgatttggtagtttaggtgcggttttaatcgttttcgttttttatttcgtattcgtttttattttcggagcgtaaattttagggttggtagttgcgcggtgttaaaggggaggttaaattatttcgttgatttttgtacgattttaaattttcgaattgtaggatttattcgcggtcgtggggaagaggcgcgtttcggacggcgggaaggttttttttttaaatttaaagcgcgcgggcggattaatttttagttgttgttattattcgatttttttagaggatcggcgcggtgggtttattcgtttttttcgttttttgtttattgtgttgggagattggtatagtttcgtcggtcgtatagagtttaataaatacgtatttagtgttaagaatagttattaggcgtttaatttcgaagttaaagcgggcgtaatttttttttgggaatttagtttaggtacgtcgtttttcgtttttaaatttagataatgtaattcgttttaagatattttcgtttttttaaggaagagatcggtggtttgagtttcgaggtagcgcgtacgttttttttgtatttgtgtatagaatgtttttacgtttgtaaatagcgtgtaagtcgtcgcgcgcggcgggatttaagggggagatatatgtagttattggaacgttttttttagtcgttttttttcgatttatagagaaaaagattttaattttgttttttttttatttattcgtattatataggtatggttaagaaaatttttttcggtgatttttttttggagtacgggtatttttaatgttttggtcgtttttgttcgttcggagaggggttgcgttttaagtttaaacgtttgtatatttatgataaagtaggttgaaattggatttatattgattttttttatggtaatcgttggttttttagatgcggtggttattggagtatttaggttttcggcgttattttgttatttgttgtcgtagttaataaattgaagtttttggtcgcggtcggatttttataaaaatacgtttcgagcgcggcgtatgcgtcgttggggcggggagggagaaggcggggtgggggagaggggtagacgcgaggaaggagggcgtaggggcggggcggagaggtgcgcggtttgggaagtttaggggattttgttgtttgcgggtggtcggtagtgagttcggagtcggataggattttttagaggtattttttaagtttgagggaagcgggatgcgtttgaagataggtgggaagcgcgggttaggaacgcgtttttttgtggcgcgtttatttttgttaaagtggatggaattttagatttgggaatgttatagtagagatattgaggtttagggaaggggagtgatttgttggagtaatttaattagtaggcggtaatgttggaagtagggttaagtttttaatcgtttattttttcgcgtttttagtagacgtagtttatttaggaggtaaaaggagtaaagattttttttttcggaggatgtagttatatttgtatatttatagtattattagggttaggtgtagataattaggagatatttttagaagaaggtaggatttggtataattttggagattgattagatgtagatatgtattgtttagtaattttataatagcggtaattaattcgcgaatagtgttttattattttaaaagtatgttttattataagagtaatttagcgattagtattttttgtaatagattattaggaatttgtatagaattatttatttatttttataatatcgtgtgggtattattattatagagatgtatttagttcgatatttatagaaggacgaattgcgtgttacgtattgttttaggcgttggggatttagcgtgaattagataaggttcgtattcggagaaattagtaaataagttcggagagatgaaatgttagggatgggtagggattttaagtcgggtttgaatttaggttttcggtttttatattcggcgttttttacgattttgagtagaggataagttttggtacgaattagaaattaggttgaagaattgggcggggcggagtgggggtgggggttagacgtttaaagcgattttagattggttgaggtttgtagtgggcgcgtagatagtgttttttttttcgcgttattttttttcggcgcggagattgggtggggcgggggagcgagtgtggggcggggtcgagaaattgcgttcgtaggcggggtggttcgttgcggagatagttgggatcgaggcgcgtgcgtcgcgatacggattttagaggtttttatttcgaaatggtttcgaggagagggattgtttagattgtattttatatacgattttttttttttatattaaaagaggaaatatttattggagtgttttagaggtagttcggaggtagggaattttttttttatagagtatgatttattttttttgtttgggatttttttttaatgttggtggttaaaggtttttatttattttgtatttttattgatataggaaagatgatatttcgggtcgggagatgggatttttagaaacgaacgagttaggatatatattaatggttagataaaattaattttaatattatatttgtagaattaaaaaaaaaaaaagaaattttaggtttttggagggtggtggttggaagaggtttcggaagttttacgtttttttttataggttttgtattacgtatttttttatttgtattttttataatattttttataataaacgataacggtaagaaataaaaatgaaaataaaatcgtaaaaatatttttatttttttcgaatttttaataaaatttaaggatttttatatttttatagatacggtagattttatttattgaaggtttagaattttagagcgtttttatgatttgttttttataaagtttggtagtggtagaattagtatgttttattttggatcgtaagttgtattttattttaaaatttttttttgtacgatgtttaaaatttgaaaggtgagattttttaaatttgtttaaaaagggaaagaggagaaaattcggagtaaaatggtttgtataataaatatttgttgattgtagatagataaaagaaagtttttttttttatttgaagattttttttagatttttttagggatttttattaaaaggaagtagataattaaaagaataatgagatgttatttggtgattattaaattaggtaaaaatttatttttttttaaagataatatttggttttcggatttgaaaagattagttgtttttcgtttgttattgatgggaatgtggtttgggatagttttattggaaagtattttttatttagtaggaattttagaatagtaattttatttataaaaatttatgttataaaggtatttgtggaaatatttttttttaaatagtgaaatgtttgaatatttttaaataattattgttagtggaatagttgataagattttggtttatttatatttgaaattttatatggatatcgtgaatgttatttggaagaatttttagtgatatggggaaatatttatgaaatattaagtgtaaaaggtaggatttagaattg

SEQ ID NO: 2259 - DNA, 1809 bp, Artificial Sequence
  chemically treated genomic DNA (Homo sapiens)
tatatgtgtttaaaatttatagtatgttgattattaggaggagattttatgtgattttagggtttttggttgataataacgtatcgagattttttatatggaattagtgcgtttttgtggtggagggtgtatttgtgttagggtagggggtacgtggatattttttgtagtttttgattaattttgtaatgaattaatttttggtataaaaataaagtttattaaaagaatttaaggggtttttttattttacgataagataaagtttttatttattttgttttttttagttttggagaaaggagaggttaggttttattattttttattagtatggatttttagtttagattttacgtttttttttagtatttttagattagtaggatttgtagtaatggggaattaggtattagattttttttttatttatttttggttgggggtttttagttttgattttcgttttgagagttttaggtaggtttagagttagtttttttatgacgtgatatgtttttagagtaggtttttgggtgagataaaaggatttgggttgaatagggtggagggagtattggaatggtatttagggtaaaggtagaggtgtgcgtggtagcgttttggttgtgtttgtaaagggtacgggtattgggtattagagtcgttcgggtttttaggacggtgttgtcgtttgaagttatgttttagtatttaggtaataggtggttgaggttgttgtagatgtggagggagtagggttatgagtatttgtatttggagatgtattagattttttaggagttggggtttatttttaggtaaagttttttttggttttcgttgggaatatttagatttttttttttgttgtttaggatattgttaggtatttagtattgttatttttagtaggtttcggtattttgtattttttggaggatggggaaggagtgtagtatatgttggtttgtggtgttgttagggtaggggatagtgtagagaaaattttagtttattgtagagagggtaggatttagaagtattaaagttgaaaggttttagggagttagtaggagggttttagttgtgaagtcgttaatttaggagtagggagggtggataggagatattttggattgggattgtagggtggggttacgagggatatgatttcgtttagtagggttttttgtttggttttataggtataatttgggaggattacgtatggtgtgtgtgatgttgtcggaggatgtggagaagttgtaataggtggatagtttgtatttttgtaggatgattttggagttttgggtggttattagataatatcgtgggtataaatgtggcgtgtttttgttgtaagcggcgagttgggagttgagagttgggagtagggtgggtagtttgggtgtaggggggaggcgagagaggtaggatttaaaagtatatttgttttgggtttttgtggtgggtagtgagggtgagtattcggtttagaggacggttattttgtggggtcgcgtttgtattgtgggttggggaagtagggcggtggtggagaaatgggtaggggtatttttgtagagaagacgtagagtaatgagtttttttgtgtagtgagaattcgttttgtattaatttcggcggttgtttttttttgcggtttggggatttttttttttataggttagaaaattgaggttttgagaaggggatttttattggtttaggttataggttgagtattgagtttggtgttcgtcggggttatagttttttttagggcgtttagggtttttgtag

SEQ ID NO: 2260 - DNA, 1809 bp, Artificial Sequence
  chemically treated genomic DNA (Homo sapiens)
ttgtagggattttgagcgttttgagggaggttgtggtttcggcgaatattaggtttagtatttagtttgtgatttgggttagtggaagttttttttttagggttttagttttttgatttatgggaaggagagtttttagatcgtaagagaaagtagtcgtcgaggttggtgtagagcgggtttttattatatagaagggtttattgttttgcgttttttttgtagaggtgtttttgtttatttttttattatcgttttgtttttttaatttatagtgtagacgcgattttataggatggtcgttttttgggtcgggtgtttatttttattgtttattataggggtttagggtagatgtgtttttgggttttatttttttcgttttttttttatatttaggttgtttattttgtttttagtttttagtttttaattcgtcgtttataataagaatacgttatatttgtgtttacgatgttgtttgatggttatttagggttttaggattattttgtagggatgtaggttgtttatttgttgtagtttttttatatttttcggtagtattatatatattatgcgtggtttttttaagttgtatttgtggggttaagtaggaggttttgttggacggggttatgtttttcgtggttttattttgtagttttaatttaaagtgttttttgtttattttttttgtttttggattagcggttttatagttaaagtttttttgttggttttttggaattttttaattttagtgtttttgagttttgttttttttgtagtgagttggggttttttttgtattattttttgttttggtagtattatagattagtatgtgttgtattttttttttattttttaaaggatgtagagtgtcgggatttgttgggaatggtagtgttgagtgtttggtagtgttttgggtagtagggggagggatttgggtgtttttagcgagggttagggagggttttatttgaaaatgggttttagtttttggaaggtttggtgtatttttaggtgtaggtgtttataattttgttttttttatatttgtagtagttttagttatttgttgtttggatgttggggtatggttttaaacggtagtatcgttttaggggttcgagcggttttagtgtttagtgttcgtgttttttgtaggtatagttagggcgttgttacgtatatttttgtttttgttttgagtgttattttaatgttttttttattttgtttagtttaaatttttttattttatttaggaatttgttttggaaatatattacgttatgggagaattggttttggatttgtttgagatttttagagcgaaggttaaggttggaggtttttagttaaaggtagatgaaggagaagtttggtgtttaattttttattgttgtaagttttgttggtttgaggatgttgagaaaaggcgtggggtttggattgggggtttatgttggtggaaggtggtgggatttggttttttttttttttagggttgagaggagtaaaatggatggggattttattttatcgtgagatgagagggttttttggatttttttaatagattttatttttatattagagattagtttattgtaaaattgattaaaaattgtagaaaatgtttacgtattttttgttttgatataggtatattttttattatagaagcgtattggttttatgtgaggaatttcgatacgttgttattaattaggggttttggagttatatggggtttttttttggtggttaatatgttgtgggttttgaatatatgta

SEQ ID NO: 2261 - DNA, 3231 bp, Artificial Sequence
  chemically treated genomic DNA (Homo sapiens)
gtttttgtttatgtagatgacgagttagtgggtgtagtatattagtatggtatatgtatacgtatgtaattaatttgataatgtgtatatgtattttaaaatttaaagtataataataaaaataaaataaattaaaataaaatatatttttattttgttggatttttaagtgatgtttttgtcggggatttttatgatatatttttgaggaagatgagaaacgaggttttttaattttgttaaatattttagatatataaatagtttttattttttatggtagtatggggttgtaaaaatgattatgtaagttaaaatcgtgtaaagtaattttaaaaattaagagaaaaattaaaattgttttgtgatttttaaaatttgttgttaaagtattagaaatttttattataggttataagtgtgtaggggaataaataaataaaaatagtaaaatattttaggatatagtaatttgaaatattagaaataatgtaatattttaagtgttttttttttttgtgaaaataaatttattaagaggttttttaaaagtgtttgtttttttttttttgtataatttacgatattgagggaatattttttttatgttagtgaattgttatagttttttataaatttgtattagtttgtagtattttatttttttgtttttagtgttgtgaaatatttttggaagtttttataatgtgaagttttttgttgggattattttttgtgggatatttttattttttttgttgtaattattttttttatttatgttttgaataatggttttaggttttattaatataaatcgaaattttaagggttttaattgttagaaagttatatagaatttatttagaatgatgttaaattttattttagaaatttaaaattttattttgttaaaaatagtttgttattaataaaggaattagatgataatagatataaggttgattttttagtttcgatttatatatattaaaaaaaaaataattataaaattgtttaatataagtataatgtgtttttaggagagaattttaaaggatttttttagtgtatttttagtgttttgtatttaagtattaatgattatttaaatggtagaataatataaaatgatgaaataattggataaatttaattatgttgtaaaaattttgtagttgatagaaattagtttttggattttaagattttatatagattagaggagaaatataatgatatattttttaagaatttgatgaaagttatggtttttttttattagaatgtgtcgattataatattttatgtagtgttttaaggaatatatagagtttttaatatttagttagaagttttggttgtgaatttagaattttattataggtgaaatttagtataagtttgattgagagttattgtaagttatagaaattttaggttttgtttaagtaaaggtaaattttggagtatgttatttgttattgaaaatgtatttaatgatgatttattttttttttattttataagtttgtttaatttatatttttttagttatagattatttattatttttgaaattttgttttgagagtaaagggattataaaatttggttgaaaagatagatttaatggtatgttaaaaaatatagtagaattagtatattagattgtaaattgattgttttgtataggatgttagttgtttttcgaatgaggtttttgagtggtatttgagtttattgttggtggtattttattttgtttgttttttttttttttttttttttttattttttttattttttttttttttattttttttttgtaattttttttttttatattatcgttggtcggtttttagggatattgtttaatttggtttatggtataagagattttagatttttattgaagttattagagatggtttgagtgagtattttgaatttattagataattgatggaaggttttgagaagattttaacgatgtttaagaaatgtgtttttattgtagaaatttattattttgattaaaaaagttattttggttaaaaaggggagttgggagattgtttttttgttttgaaattgatttggttttaagggaagaagattgtttaaataaaatttgttgatgaagttataaaatgattttatttttggaatgagttttatttttttataatttggtaagaaatttggtttttaattgggaatgtacgttattttatttatttaagggtaagatgataaggttttattagattaagcgtttaaaggaatttgagattttattaaggttagaaatgttgtaatttaagttaaaagattttttttgggtttttttgttttgatttgtaattataaattagttttgtttaaatgtttgattatattataaaatagtaagtgaatttgtattgtatagtattttttgaagtaataggagttatagatgaattttttaggggattttgtaatttttttgtttttttgatttttataggattttaaattgttttttttgaggttaaggaatataagatggttttggaaatgttgaattcgatatattataatattattagtatcgtgtttgaagttatgtttgttgttattatgttagttttgttttttattggttttttttttttggtgtggaattatgagggtatatttttaatattaggtaagttagttatttatttttgtatttaaggagattatttatttgggattttggtttatgatggtaaagaaaattttgtaaaaggataaaaagtaaatttggaaagatttttgaagattatgtttgtgttagtaaatgaggatttgggagaaaatttttagattaattatttgtatattttaaatgaaagtatttaaaaaatattttagataaatttttttattttgtgttgtgttttcgtaaagtagatttggtataagtattttttaaaataagtttaagatggggtggagtaaagtaaaattttagggttttttggttaatttttaaaaaatagattgtaattttgttttgaaggtgaaaatgtttttggaatattttttttattgtttttttttttttttttattttgttttttttatgttttttttttgttttgtatttattttttttttttattttatttattatttttttttatttttgggaatgtggtgatagtggtttttattttttttttattgtttggattt

SEQ ID NO: 2262 - DNA, 3231 bp, Artificial Sequence
  chemically treated genomic DNA (Homo sapiens)
ggatttagatagtgggagaaaaatggggattattattattatatttttaagaataagagaaaatgatgagtggaataaagagaagggataaatataagataaagagggggtatggaggaaataaagtgaaagggagaagaaaagtagtgaagaagatgttttagagatatttttatttttagagtaaaattgtaatttattttttaaaagttaattagaaaattttggaattttattttattttattttattttgagtttgttttaaagggtatttgtgttaagtttattttacgaaagtatagtatagagtggaagggtttatttaagatattttttaagtgtttttatttaaaatgtgtagataattggtttgaaaatttttttttaagtttttatttgttaatatagatatagtttttagagatttttttaggtttgttttttgtttttttgtaaaattttttttattattatggattaaaattttaagtaaataatttttttagatatagaaataaatgattgatttatttggtattgaggatgtgtttttataattttatattaagagaaaaaggttagtgaggagtaggattggtatggtggtagtaggtatggttttaggtacgatgttggtgatgttataatgtatcgggtttagtatttttaaaattattttgtgttttttgattttagagggggtaatttagagttttgtggaaattaaagggatagaaaaattatagaattttttaaaaggtttatttatagtttttgttgttttagagggtgttgtatagtatagatttatttattgttttataatgtgattagatatttaggtaagattaatttatggttataagttaaaataaggaagtttaagaaagattttttggtttgaattgtagtatttttgattttggtagagttttaggtttttttagacgtttggtttgatagaattttattattttgtttttgagtgggtagagtgacgtgtatttttaattgaaagttaaattttttgttaaattataagaaaataaagtttattttagaggtggagttattttgtgattttattagtaggttttgtttaggtaattttttttttttgaagttaaattaattttaaaataaaaaggtaattttttaatttttttttttgattaaaatgatttttttgattaaaatagtaagtttttatagtaagaatatattttttgggtatcgttgaggtttttttagagttttttattagttgtttaatgaatttaaagtgtttatttaggttatttttagtgattttaatgaagatttaaaattttttgtattatgggttagattaaatagtatttttagggatcggttaacggtagtgtggaaaaaaagaattgtagaggaagaataagggagaagagaatgaaaggaatggggaaggaggaagaaagagagaataggtagaataggatgttattagtaataggtttaggtgttatttaggaattttattcgaagagtagttaatattttgtgtaagataattaatttatagtttgatgtgttggttttgttgtgttttttaatatgttattgaatttgtttttttagttaggttttgtaatttttttatttttagaatagagttttagggatggtaggtagtttgtagttgaagaggtgtaggttgaataaatttgtagagtgaggaaagagtgagttattattaaatgtatttttagtggtagatgatatattttaaggtttgtttttatttagatagggtttagagtttttgtgatttgtaatggtttttaattagatttgtgttgggttttatttgtaataaaattttagatttatagttagggtttttaattggatattgggggttttgtgtattttttgaaatattgtataaaatattgtaatcggtatattttagtggagaaaggttataatttttattagatttttaaggagtatgttattatattttttttttgatttatatgagattttaaagtttaaagattgatttttgttaattataaaatttttataatatagttgaatttatttagttgttttattattttatgttattttattatttaaataattattaatgtttgggtgtagggtattgaaaatgtattggaaaggttttttgagatttttttttgaaagtatattgtgtttatgttgagtagttttgtggttgttttttttttaatatatataagtcgaaattaaaaagttagttttgtgtttgttattatttggtttttttgttgatgataagttatttttaatagggtgaggttttaaatttttagagtggaatttgatattattttgagtaagttttatgtgattttttgatagttgggatttttgaagtttcgatttatattgatgaaatttgaaattattgtttaaagtataaatgaggaaagtggttgtaataaaaaggatgaagatgttttataggaagtgattttagtaaaaaattttatattataggaatttttagaggtattttataatattgaaagtaaagagataagatgttgtaagttgatgtaaatttataaaggattatggtaatttattggtatagaaaagatgtttttttagtatcgtaagttatgtaaagagaagaaggtaagtatttttaaaaaattttttagtaagtttatttttataaagaaagaaaatatttaaaatgttgtattgtttttaatgttttaaattattgtgttttaaaatattttattatttttgtttgtttgtttttttatatatttataatttatggtaagagtttttaatgttttgataataaattttaaaggttatagaatagttttaattttttttttgatttttaggattgttttgtacggttttagtttgtatggttatttttatagttttatattgttatgaaaagtgaggattgtttgtgtgtttaaaatgtttaatagagttaagaagtttcgttttttattttttttaaaagtatgttataaagattttcgataagagtattatttaaaaatttagtagggtaagaatatattttattttagtttattttatttttattattatattttaagttttagggtatatgtgtatattgttaggttagttatatacgtatatatgtgttatgttggtgtgttgtatttattaattcgttatttgtatgggtaaggat

SEQ ID NO: 2263 - DNA, 1701 bp, Artificial Sequence
  chemically treated genomic DNA (Homo sapiens)
ttgtaggttaacggatttttgtttaaataggtaaaaataaaaaatatatgaaataaatttatggtatttatagttaaaaatggaaataatttatatatttattaataggaaattagttaaataaattatagtatatttatttaatggaagattaagtatatatttaatataattatttatatatatataatgatatatatatgtataaatatagagaatattgtgggtgtatgtgtgtgtgtgtttatatatatatatatatatatatagtattgttgtttatttttttggtttaattttgagaatttttatttattttgttttagtaggatatatttttttttttggtttttagatttattaagttgatttttgatttaagatattgtatttgttgttttttttttttggaatatttttttttttgatatttatatgagtagtttttttttgttatttagattttaaatgttataattttagagagtttatttttgattattatatttaaagttgtttttatttttttatagttttttatattaagtttttattttttttataatatgtattttattatttttttttttattggaatataatttttattatattaggaaatttgtttattttattaatgtttgtaattggaatatttttgaagagtttttggtacgtaataaatatttaattaatatttttgtgtatatagaaataaagtttggaagaatagatgttaaattgttattagtggttatttttgagtaaaggagtagtatggtaggtaaattattaatagatgtttattttttattaagatatgttttagttagttttaatttatttgaaatgaaatttattattttaataattagaaatattcgataaatattttagttataatgtaatgattaagaatgaaaattattgatgttttaataagtttatatttttttagaggatatttattattgagatagtttttttgaggatgttaggtgagtaatatgttattatatgtagtaaaatatttatgatttataaaagtattgaaattgaagtagtagaaatgttttttttagttttttttttttttgaatttgattatcgtttttttggtaaagtatttaaattaatttttttttaaaagttaataagattaaattataagtttgatgaataatttatttttatttttttttaaatgattatagtttatgtatttattagttatgtttattttaaataggtttatttgttttttttatatatattaaatttttaatattagttgttgtttttaggttcgaatgttaagttaatatatatttgagagatttttaatttattaagtattgtaggtttttgattgttttggaattatttttgatatttgtggatttagtttaaggttagttattattatttttttttttttaatagaatgaataaatggttaattgtttgttttgttaattaagtttaagttaatggatttggatattatgtatataaaaagtttagtttgagtttttttttagtggtatttttttttttttaattagagatttttttttttatagattttggtttagatttgtaaaatgatgattatatttttgatttgggggattgttatagtagtatgttgttgtttatggtttatttttggaattaggaggtaagtaatgttttatttta

SEQ ID NO: 2264 - DNA, 1701 bp, Artificial Sequence
  chemically treated genomic DNA (Homo sapiens)
taagataaaatattatttattttttaattttaagaataagttatagataatagtatgttgttatagtaattttttaaattaaagatgtggttattattttgtaaatttaggttaaaatttgtgaggaagaaaatttttgattagaaagggaaggatgttattgaaaagagatttaagttaggttttttatatatatagtatttagatttattaatttgagtttggttgataaagtaaataattagttatttgtttattttattagaaaaaaaaaagtggtagtaattggttttgaattaagtttataggtattagaagtggttttaaagtaattagagatttgtaatatttgataagttgaaggttttttaaatatatgttgatttaatattcggatttggggataatagttaatattaagagtttggtatgtgtaaaaagaataaataaatttgtttaagatgggtatagttaataaatatataaattataattatttaaagaaagataagaatgagttatttattaagtttataatttggttttgttaatttttaaagaagaattaatttaggtgttttgttagagagacggtgattaagtttagagggaaagagaattgggaaaaatatttttgttgttttagttttagtgtttttataaattatagatattttattatatatagtaatatgttatttatttaatatttttaagagagttattttaatagtgagtattttttagagaaatatgaatttattggagtattaataatttttatttttgattattgtattgtgattaaaatgtttatcgaatgtttttaattattaaagtaataaattttattttaagtaagttaagattaattaaaatatattttggtggaaagtgaatatttattaataatttatttattatgttatttttttatttagaagtaattattagtaataatttggtatttgtttttttaaattttatttttgtgtatataaaaatattagttgagtatttattacgtgttaagaattttttaaaagtattttagttgtaggtattaataagataggtagattttttaatataatggagattatattttaatggagaaaggagtaataaaatatatgttatgaaaaaaataaaagtttggtatagaaagttatggggggatgaggataattttagatatgatgattagagatgggttttttgaaattgtgatatttgagatttgaatgataagaagagattatttatgtgaatattagaaggaaggatattttaggaagaggaagtagtaaatgtaatgttttgagttaaggattaatttggtgagtttaagaattaaaaagaaggatgtattttattgaagtagagtgaatgagagtttttagaattaagttaagaaggtaggtaatagtattgtgtgtgtatatatatgtatataaatatatatatatatatatttatagtattttttatatttatatatgtgtgtattattatgtgtgtataaataattatattgaatatgtgtttaattttttattggataaatgtattataatttatttaattgattttttattgatggatatgtgggttgtttttatttttggttatagatgttatagatttattttatgtgttttttgtttttgtttgtttaaatagagattcgttgatttgtag

SEQ ID NO: 2265 - DNA, 10020 bp, Artificial Sequence
  chemically treated genomic DNA (Homo sapiens)
gagtttaattaatttttattaaagggagtcgattcgatttaagaaaatttggagagtttagagagatggtttagtgatttaaagtatttatttgtagtttttgtaaatgatttgggtttaatttttgttatttatatggtagtttaaaattatttataagtacggttttaggggatttgaaacgttttttgatttttgaggatataggtatatacgtggtgtatatatatgtaggtaaattatttatatatagaaaataatttagttgggtgtgttggcgtattttttagattttagtattttggaggtagaaataggtgagtgttaggttggtttggtttatagaatgggttttagggtaattagggttatatagggagattttgttttaaaaatttaaaataaaataaaattaataaagataaaaggaaaaaagaaagaaagaaaaggagaagttgagtgtggtgttttaggcgtgtgtttgtagttttattgggttgggaatgtggtttagaaaggtttttagtatttttttaggggcgggttgtttagaggtagaatgttagttaatgttatttatttagagtttttttttataataaaataaatagttggatttaattttatttatttgtattttatagaatttttttgtttatttagtaatgtgagtgatttaatacgttatagttttaatatgtattatttttttaagttatttttcgatgatatatttatttattttatatgtattggttttgtttatatgtatgtttgtgtgagggggttagattttttggaattggagttatagatagttgtgagttattatgtgggtgttgagaattgaatttgggttttttggaagagtagtaagtgtttttaattattaagttatttttttagttttttttttaaattattaatgaggtattttacgttttgtttttatataaaattttaaattttagtgttattttatatttattagattaattagtttttattagtttttatcgttaagtagttgttgaaggatataggagtaagaggttttagttagggtagaatgttttggtagaatattggggaagtgtatagttttaaagtcgttaatatggtttgaatgtttgaatttgttttttttttgtaggttttgggtgttttaggatggaatagttgtgtagagggtgaggatttaattttgggattatattatttgtttttttttttagtaattggtggtttgaataaatattagtttgggtgaggatgtttgtggataattggttattgtattttttttggggatagattttttttttttttttgtttgtggttgtggtttaggtttattggtttagtgaatttttagaggttgtgagggattggaagaattagtttgaggcgtttatgtatttagtttttttcgatttttaggaggttgtttttatcgtggttggtattttagacggtacggttgttgtcgggcgtttatttcgagtgagtattttaacggatttaattgtttttagtggggagattattaaggtgagattgtatgtaagtatagttgaggaaggaagaggtttttttttttatttagttttgatattcgatgttttttttttttttgttgtattttattgatttatttattgagattgggttggttcgagtatttatatgtatgtatgaatattatatgtgtgtttgttatttgtagagattagaagttgttagatttattgagtcgtgatttttatttgagttattttttttttaaggtttaggttgggaaagtttttagtaatagtttttttttttttttttaaattgtgtgtgttattgaagttagaagaggatgtgtattttttggaattggggttatatatggttgtgagtttttatttgggtgttgagaattaagttttttagaagagtatttagtgttttttattattgagtcgtttttagttatagtttagtagtatttttattttcggtttttagttgaaatttttataaagtttggtgtggtttttttgatatataaatttagttttttaggttgaatagtcgtagattttatgttagttttatttggaagaggtgaatttgttgtttttttttttttagtgtgggtgagtttttttttttggattttattttttgtaaattatagtttgtttgtagggtggttttatttcggaagattttagtttatagagtaggtgaattttatagattaatattagtttcgatttttttgtttttgttgttgtttgtttttgagatagggttttattatgtagttttggttgttttggaagttgttttgtagattaggttggttttgaattcgagagatttttttgtttttgttttttgatggttgggattaaagacgtgtatcgttagtattagtttatagaatttttttattttagtaggtagatgttaatttattagttaaagattggtagttcgaaggatatgttgtttgtttgattttatatgattttttgagtgttttgattttgtattggttgtttttgtttcggtggttattggaatgttttatatgggttaattttgattagaagtattttgaattgatatagtgatttagatatttgtagtatttggtagagatatataatgaatgggtttattaggagtataaagagtttttattgggaaaataggatttatttgaatatatttatttgtggagaataaatagtttagtagttgatgagtttttgggagagtagatgaagtattggggtgtagtttagtagtagagggtttgtttagtatattggattaagattttattttgtagttattttgttttttagaattagggttgtgtggattgagggtttggaaaggtaatgtatgatttgattttgggagtttcgttttgtttttttcgtttgtgaaaataagtttaaagaggatttatttatttattttgagatagagttttcgttggtttttgaattatgatttttttattttttttgttgtgtggtgggattataggtgtgtgtcgtcgatttgaatgaaaagttagtggtaaagtagtaatcgaagggttggagagagagaaggtttaggagttaaatatttgtttagaggatttgggttaaatttttagtatatatttggtggtttataattatttataattttaggttttaaatattttttttgttttttgagggtataaaggatgtatgtgggatatagatatatatgttagtaaaataattatatatatgaaataaagtaaatatatttaaaattaaaattttaaaaaagttatatatatttgtaaagtatgtgagagataaaggaaaagtttttgtggtttttattattttttatgtttattaagaggtggatgtattatatatatagatattttagattgatttaagatttgtaggtgtttgtgtgtgtgtgtgagtgagtgttagttgtgtatgattttgtaggatgtaaaagagggtattggatttgtaatagttggagatataagtggttttgaattatttagtatgggtgttgggtattgaattttgggttttgtaagaattgtagtttttttttttttttttttttttttttttttttttttttgaattgtaaaataattataatgtttttttttttttttgttttttttttaaatttttttatatatttttttttagatttttggaaattcgtggtttttttttttatttatttatatatatgtgtgtgtgtatatatatatttatatatatatttatatatatatatatttgtaaatattatttgttcggtttgtataatgttatttgtatgagtgtttttagggttgattatttggtattgggtaattaattattatgttcgttttggggaagggtattttttttgtttttagcgtttttaggtatttatagttgtttgtgtagggttgagattttttggtttttttttatttatttttgggatgtttatgggttttatttttgttatagtttatatttgggtagttatattggtaagatttatgggtgttttattttgttttgtttttgaaataggtttttattatgtagtattggttggagtggattttattatgtagatagattatttttgaatttatagagatttatttttggtttttaagtgttgggaagaagaaagtatttttagttgataaattatttttttagtttttattgtttaattatatttatttgggtgtgggtgtggtgaggggagtgtgttttggattttgtgtggaaattagaggagttggtttttttttttgatgtgggttttgggattagtttatgttttagtgttaagtttaataattttaaatattgagttattttttggttttggttgtatttttaacgtttttttaatttgttgtagtttgagttttattttatgattttttttttaattttttttttttattatttgtttattgtattttgggtgtattgtaattgtttttagagatattagaagagggtattaaattttattttagatggttgtgagttattatgtggttgttgggaattgaatttaggatttttggaagaataattagtgtttttaatattgagttatttttttagtttttattttatgatttttaatatttattatgattgtatttgttagtggttgtttagtgttatgttttttttttgtttttgaaatggtgttttattgtgtttatagagatttgtttgttagtgtttttttattaaagtggtgtggtatcgtatttgatataaggagtattttaggttaaatatgttagtatatgtttataattttagttttggagacgtggaggtaggaagattaggagtttaaggttattttaggttggtatagttagtttgagattaggttgaatatatgagattttgtttgaaataagtaaataagtaataatagaaagagtattttagatgttattattaggatttttgtttaggatagtttttaagttagagttgatattttcgtgtttgttattttttgtttaagtcgttttttgtttttttttaggaagttttttatttatgtttttgatttatttagttttttttatattaaagtaagagatattttgttattttgaatttatttagtattttgttattgatcggtatttagatttaggttttgaattttgtttttagtttttttttttttttttattgttttttgttttttatttttttttcgttcgtttttttttgttttggttattttttttttagggttatgttagtttgttggttttatttttttttttttttgtttttttttttagtattgttattttttagatttagtttgaatattttttgagttattagagttttgttttttatttagtgaaagtagtttttttataaattttgttatttttttaaatgtttgttttggtttttcgttatagtgtttgtttataaatttagtattttaggaggttgagatggttgaaggttagtttaggttatagagtaagattttgtttataaaatagaaataaataaatttttagtaataaatatatgtttgaaatttttgttttatgttattttgtatgttgttttttgttatttagtagatttttaaatgattttaagtaggtagagtgaataaagatttttttttattttaaatttggtttgaatttttaaaatttttgtatattggtgttgggtttgggtcgtagtttgttatggagagttttcggttgtaggtttttttatgtgtttagtttgtattttggagagttagtagtaacgggtaattggggaagagttggtgttaggtaggagggagtaagtttaaaattttaatatgtaggaggattttttttagtttgagtttagttttagttgtagagtgaggttttgtttggaaaaataaaataaaaaaggtaagaaatattttatattatttgaaagagtgatatatatattgataagatgtttttgtagagtttttttagagtttttattttggtatagtttgtggacgtggtttttttttatttttgttttgtttagtttttttgtttttagataatgtggatttttttttagtttaagttgtcggttggttgggagtagtttttgttgggattttgtttagtcgttggtatgggttgtttaattgtttttttgagaataatggttattttttgtagttaggaagaggggtttatgaaaggggtttttttggggggggggatgtttgagagttttgtggtattgtagtttgcgtgagatgaattatagtttttttttgtttcgagtgggtgttttttggttttgaatggattttttgtgagtatggtatatcgggaagtgtgggttgttaaaggaaagcgtttttgggagtgggttgttagaatggtatttgtttagatttattaatttaaatatttattgaaaatagaggtttttttgttttatttttttattttattattggtaagagttgagaaataaaatgataaagtaaaaatagatgttaagatttagggagaaggattgattgtgagaattttttgagtggttataattgtgtttagttgtttttttggggagattttttttttgaatatatatgtttatgtttgaatgtgattggtatgtgtgtagttatttgtagaggttagaagaagatattagatttttcgaaattggagttataaggtagttgtatttttaattattgagttatttttttagttttaaagattaatttttaggggaggatagttaatattagataaagtattttatagtttagattagaagggtattggttggtttggaatgtggtttcgtggtttaggtttttgagagaggaattaagtatagttttgatattgatatatttggatgtgggatgagtgatttttttttgtagttttggttgttttatttggtatgatgtttggttttttagttttaagttagatttgtgttttttttttgaatgtagttttgttttgtgattgttatatttattatttgtagaaggttataggatagaaaataaagggttatgattgttttatttgggagtgttttagagggttttttgtggtttttgtagttaattttttacgtaattttgtaggttggtttagttaggggagagagttgaaggttaagggttagtgataaggtttgaggaaaggttttaggtattttatttgaataggtggtataggttttaatagggattatggaaagagggattttagtatatttgtaagtggatataggaataggtttagggtttgatgagtatagaggtatttgttggaagatgttattatagagatgtaaaggatttattagaaggtttgtaatatgagggaattgattttgtaggttattgttagtagtataagtgtttgtttatggagttttatttttttgtattttttgcgtagatgtattttgtaggtttgaatggtagtatttatagttttttggtttataagtttattaaaattaatttagttatagttttgtttttttggttatatttattgttttgttgaaattgtgaatgaaattttttttgatgaagaataagtaatggaaatttttatttaattgttttttttttatgttttgaagggtattggtttagagtagagtttttggttgtattttttggtatataatgtatatgggtatttttttgttatagttttttgttaatttggttataaatttttttatttttcgagttttgtgtaagaaggtttaagtatagaatacggaattagtgttttagagttgaaattattagttatttaattttttaggttaaaggggattgggttggttgttgttgatagggtttttttgtgtatttttggatgtttttaaaatttatttcgtagattaggttgattttgtttttagtgttgttattgaaggtatgtattattatatttagttggggattagaattttaaatttggtatttaaagtttttgatagaagatgttttgtgtataaatttgaggtttgaattggagttttttttaaatattttggtttttgatgggaaggagatttaggtagttattgggatgtttagaggtatgatattaatttttttgttataggatttatgttaagttgtggttttaaattaaaaataatttttgagttagtgttgaaaatttttttttgttgtttattgtgtttttggattagggggttgaaaatatttttagttagagtagagaatgttcgatttttttttttttttgttttagttttttgtttttgtttttgtttttttttgtttgtttgtttgtttgtttgtttgtttttttgtttgtttgtttgtttttttttttttttttttttttttttatggttttaaggcgtttattgtagaagggtagggagaggagaagagtagagaagtaaaagtggggagggggagtaagagggtaagagagtaagagagcgcgtgattttttttgaattaggggtaggagtttgtattttataaaggtgagaggagttgaatatgttagttaatagaaattttttgtgtatgttattgagggagaggattcgaatattgagtttatttttgagatagatatttgtggtcgatattgttttagaataattttagttgttttattttgaggatcgtagttgttggggtttgagaagtgggatttatttagatagatattataattaattattttataagaaatgtgtattttattaatttttatgtattaagtgatgattgtaaaataagttattcggggtatggattttttttttttttagacgtatgtgcgtttgcgtttgtgtgcggtaaggtattaagttgggtttatgatttgagtagtgtgtgtttgttaagagtaatagaggggattggaaagagtgttttaggttggaataaagtaagttgataaggagggtgtattattcgtagaaaagtttataagaatttttgatttttaatttatatgtttttattggtcgtgtttgtttgtttgtttgtttttatttttgtgtgtgtgtgtgtgtgtgtgtgtgtgtgtgtgtgtataaattatatgtaagtatattgtagttgtttttagatattttagaagagggtattagatttaataacgggtggttgtgatttattgtgtggttgttgggatttgaatttagtatttttggaagagtagttagtgtttttaatcgttgagttatttttttagttcgttggttttattttttaagatttatttttttatatatgtattagtgtgtttgtttgtatgagtttatgtgtttatgtgtatagttgttagaggaggttagaggaggttaggagttttagaagttgtagttatagttatttagtgtgggtgttaggaattaattttagtttttttaattgttgagttatttttttagttttgtttggttgtttttagagatagggttttaatttgtattttagattggtttttaatttatttttttttagatttgttttttgagttttgggattattcgtgagtatgatgtttagttaaagttcgtatgtttttaaggatcgtgatattttagtgtgtgttagtgtgttttagtgttgtgtggtatgtgataggatgttatgtgatagggtattattgttttttttaggaggtgatgagttggattttttagtaggaattgtaaattatttttttagtttattatatattttaggttagagtttggtttattatggtgattattttaggttaggttatgatggtaatatttataatttatatttttgttttttttaggtgtttgtagtagggaaggaggttttatcgttttggttatattgggatttatatagttatattttggaaggttttttttttgatattgataaaggtgtgtattatattttagtgagtgt

SEQ ID NO: 2266 - DNA, 10020 bp, Artificial Sequence
  chemically treated genomic DNA (Homo sapiens)
gtatttattgagatgtaatgtatatttttattagtgttaagaggaaggttttttaaaatatgattgtgtgggttttagtgtagttaagacggtaaggtttttttttttgttgtagatatttagaagagataaaagtgtgagttataaatgttattattatggtttggtttaaaatgattattataataaattaagttttaatttgaggtgtgtgataagttagaggaatgatttataatttttgttgggaaatttaatttattattttttaaggaaagtagtagtgttttattatatgatattttgttatatgttatatagtattgggatatattaatatatattaggatgttacggtttttaaggatatacggattttgattgggtattatgtttacgggtaattttagaatttaagaggtagatttaaggagagatgagttgaaggttagtttggggtataggttgagattttgtttttaaaaataattaagtaaagttagagagatggtttagtagttaagaggattgggattggtttttagtatttatattgggtagttgtagttgtagtttttggagtttttaattttttttggttttttttagtaattgtatatatgagtatatagatttatgtaggtaaatatattgatatatatataaaaaagtaaattttaaaaaataaaattagcgggttggaaagatggtttagcggttaaaagtattgattgtttttttaaagatattgagtttaaattttagtaattatatagtgaattataattattcgttattagatttgatgtttttttttggggtgtttgaagataattatagtgtatttatatataatttatatatatatatatatatatatatatatatatatatatagaggtaaaagtaaataaataaataaatacgattagtaaaaatatgtaaattaaaaattaaagatttttgtggatttttttacgagtaatatattttttttgttagtttattttattttagtttgaaatattttttttagttttttttattatttttggtagatatatattgtttaagttataggtttagtttagtattttgtcgtatataaacgtaagcgtatatacgtttggggagaaggaaggtttatatttcgaatgatttgttttataattattatttaatgtataaagattaataaggtatatattttttataaaataattagttgtaatgtttgtttaaatgaattttattttttaaattttaataattacggtttttagagtagggtaattaaaattattttagaataatgtcgattataggtgtttgttttagggatgaatttagtgttcgagtttttttttttagtgatatatataaggaatttttattggttgatatgtttagttttttttatttttgtgaaatataaatttttgtttttgatttaagaaaggttacgcgtttttttatttttttgtttttttgttttttttttttatttttatttttttattttttttttttttttatttttttataataaacgttttaaaattatggagagagagagagagagagagagagatagatagatagatagagagatagatagatagatagatagatagatagagagagatagagatagagatagggggttggggtaaggggggggggaggtcgggtattttttgttttgattgaaagtgtttttagttttttggtttagagatataatagataataggaggaaatttttaatattagtttagggattatttttagtttaaggttatagtttaatataggttttatggtaaaggggttaatgttatgtttttgggtattttagtggttgtttaggttttttttttattaaaagttagaatgtttggaggagattttagtttaaattttaggtttgtatataagatattttttattagagattttaaatgttagatttaaaattttgatttttagttaagtatggtggtatatgtttttaatggtagtattagaaataaggttagtttggtttacgaaatgaattttaaggatatttagggatatatagagaaattttgttaataataattaatttaattttttttagtttaaaaggttagatgattagtgattttagttttaaggtattgatttcgtattttgtatttaggtttttttatatagaattcggaagatggaaaagtttgtggttagattggtagggggttgtagtagagaagtatttatatgtattatatgttaggaaatataattaaaggttttattttaaattagtattttttaaggtatggagaaagagtaattgagtaggagtttttattatttattttttattaaaaaagattttatttatagttttaataaggtagtaaatatagttaaaaggataaaattatgattgaattaattttaatgagtttatgaattaaaaaattgtaagtgttgttatttaggtttgtaagatatatttacgtaggaagtgtagggaaatgagattttataaataagtatttgtattgttgatagtggtttgtaaaattaatttttttatattataaattttttggtgggttttttgtatttttatgatagtattttttaataagtatttttgtatttattaagttttgggtttatttttgtatttatttatagatatgttagggtttttttttttatggtttttattaaaatttatattatttgtttaggtaaagtgtttaaaatttttttttagattttgttattggtttttaatttttagtttttttttttggttaggttaatttgtaaggttacgtagaaggttggttgtaggagttataggaaattttttgaagtatttttaaatgaagtagttataattttttgttttttattttgtggttttttgtaaatggtaagtgtggtagttataaagtagagttatatttagagagagaatataggtttagtttgaggttagaaggttagatattatgttaagtaaaatagttagaattgtaagggagaattatttattttatatttagatatattaatgttagaattatatttggttttttttttaaaggtttggattacgggattatattttaggttagttagtatttttttgatttgagttgtgaagtattttatttgatgttaattatttttttttaaaaattaatttttgggattggagagatggtttagtggttaagagtataattgttttataattttagtttcggaaaatttgatgtttttttttggtttttgtaggtgattgtatatatgttagttatatttaagtatgaatatatatatttagaagaaaaatttttttaaaagagtagttaaatatagttatagttatttaaagagtttttatagttaatttttttttttaagttttggtatttatttttattttattattttattttttagtttttgttagtaataaaataaaaaaataaaatagggaagtttttatttttaataagtatttaagttgatgagtttggataaatattattttgatagtttatttttaaggacgtttttttttggtaatttatatttttcggtgtgttatgtttataaggggtttatttagaattagggaatatttattcgaggtaggaagaaattgtagtttattttacgtaggttgtagtgttataaagtttttaagtatttttttttttaaaaaagttttttttatgaatttttttttttgattatagagagtagttattgtttttagggaaataattaggtagtttatgttagcggttgagtagagttttagtaagggttgtttttagttagtcgatagtttgggttgaggaaaagtttatattgtttgaaagtaaagaggttgaataaagtaggggtgaaaaaaagttacgtttataggttgtgttaaagtgagagttttgagagggttttgtagggatattttattaatatatatattatttttttaggtgatatgaagtgttttttgttttttttgttttatttttttagatagggttttattttgtagttgaaattgagtttaaattgaaagaaatttttttgtatgttaaaattttaggtttgtttttttttatttgatattaatttttttttaattattcgttgttgttggttttttaaggtataggttgggtatataggaggatttgtagtcggagattttttatgatagattacgatttagatttaatattaatgtatagaggttttgagaatttaaattaagtttgaggtggaaaggaatttttatttattttgtttgtttagaattatttgaaggtttattgggtaataggagataatatataaagtaatataaagtaagaattttaagtatgtatttattattgagggtttgtttgtttttgttttatagataaagttttattttgtaatttaggttggtttttaattattttagttttttagaatattgggtttataggtaagtattatggcgggagattaggataggtatttaagaaggtaatagggtttgtgggaaggttgtttttattagatggagaataggattttaatagtttaaaggatgtttaaattgaatttgagagatgataatattaagaaaaagggtagaaggaaaggagaatagagttaataggttgatatagttttgagagaggagtaattagaatagaaaggggcggacgaagagagggtaagagataaagagtaatggggagagaaaggagagttggggatagagtttagggtttagatttaaatgtcgattagtaataggatattgggtagatttaaaatgataaaatgttttttattttagtatgaaaaagattgagtgagttaagaatatagataaagagttttttgagaaggaataaggaacggtttggatagagggtgataggtacgaaggtgttagttttgatttggagattattttaaatagaaattttggtgataatatttaaagtattttttttgttgttgtttgtttgtttgttttagatagagttttatgtgtttaatttggttttaaattgattatgttagtttaggatggttttgaatttttaatttttttgtttttacgtttttaggattaggattataaatatgtgttgatatatttgatttaaaatgttttttatgttaggtacggtgttatattattttaatgggaagatattggtaagtagatttttgtgaatatagtgagatattattttaaagataggaaagaaatataatattggatagttattgataggtatagttatagtaagtattaaaaattatgggataagggttggagagatggtttagtgttaagagtattgattgtttttttagaggttttgagtttaatttttagtaattatatggtggtttataattatttgaagtgggatttggtgtttttttttggtgtttttgaagatagttatagtgtatttaaaatataataaataaataataaaaaaaaaaaattaaaaaaaaaattatgggatagaatttaagttgtagtaaattaagaaaacgttaaaaatataattaggattagaagatggtttagtgtttggagttgttagatttgatattaagatatgagttgattttaggatttatattaaaggagagaattaatttttttaatttttatataagatttaagatatattttttttattatatttatatttaaataaatgtaattaaatagtaaaggttggagaaatggtttattagttaagaatatttttttttttttagtatttgggagttagaggtagatttttgtgaatttaaggatagtttgtttatatagtaagatttattttagttagtgttatatagtgaaagtttattttaaaaataaaataaaataaaatatttataggttttattaatataattgtttaaatgtgagttgtaataaggataaaatttatggatattttaaaagtggatggagaaaggttaggaggttttaattttatatagataattgtgggtatttgagaacgttgagagtaggagaggtgtttttttttagggcgagtatgatgattggttatttagtattaaatggttagttttgaaaatatttatataagtaatattatatagatcgagtaggtggtatttataaatatatatatatatgaatatatatatgagtatatatatatatatatatatatatatgaatgagtgaaaaaagaagttacgaatttttaaaagtttaaagaggggtatatgagagggtttggagggaagataaaagaagggagaaatattgtaattattttataatttaaaaaaggaaaaaaagggagaaaagaaaaggaaaaaaggttataatttttataaggtttaaagtttagtgtttagtatttatgttgagtggtttagggttatttgtgtttttagttgttatagatttagtgtttttttttgtattttgtagaattatatatagttggtatttatttatatatatatataaatatttataaattttgggttagtttaaaatatttgtatatgtagtatatttattttttaataagtatagaaaatggtggaagttataaaaattttttttttgttttttatatattttgtaagtgtatgtaatttttttaaaattttggttttagatgtatttattttattttatgtgtatgattgttttgttggtatatatgtttgtgttttatatgtattttttgtgtttttaaagggtagaggaagtatttgaaatttgaagttatgagtggttgtgagttattaggtatgtgttaagaatttaatttaggttttttgaataagtgtttaatttttgagttttttttttttttagtttttcggttgttgttttattattgattttttatttaggtcggcggtatatatttgtaattttattatatagtagaagaggtaggaagattatagtttagaagttagcgaagattttgttttaagataagtaagtaaattttttttaagtttatttttataggcgagaaaagtaaagcgaagtttttagaattaggttatgtattatttttttaaatttttagtttatatagttttggttttgaggagtagggtggttatagaatggaattttagtttagtgtgttgggtaagttttttgttgttgaattatattttagtattttatttgtttttttaaaggtttattagttattaaattgtttgttttttatagataaatatgtttagataaattttgtttttttagtaaaagttttttatgtttttggtaagtttatttattatatgtttttgttagatattataaatatttaagttattgtattaatttaagatatttttggttaaaattaatttatgtaaaatattttaataattatcggaataaaggtaattaatgtagagttaggatatttaaagggttatataaaattaggtaagtaatatatttttcgagttattagtttttaattaatagattagtatttgtttgttggagtagaagagttttatgggttggtgttggcggtgtacgtttttaattttagttattaggaggtagaagtaagggaatttttcgagtttaaggttagtttggtttataaagtaatttttaggatagttagagttatatggtgagattttgttttaaaaataaataataatagagatagagagatcgaaattgatattgatttatagaatttatttgttttatgagttagggtttttcgaagtaaggttattttgtaaatagattatgatttatagagaatggagtttagagggaaaagtttatttatattaaaaggaaaggagtaatagatttattttttttaggtaagattggtatggaatttgcggttgtttaatttagaaggttgggtttgtatgttagaaaggttatattagattttgtgaaagttttaattgagagtcgaaagtggaagtgttgttgggttgtggttggagacggtttagtggtgaagagtattgggtgtttttttagagggtttggtttttagtatttaaatgagagtttataattatgtgtaattttagttttaaggaatgtatatttttttttgattttagtggtatatataatttaaaaaagaaagaaaaagttgttgttgggagtttttttagtttgggttttaaaggaggaatggtttaggtgggagttacggtttagtgagtttgatagtttttgatttttgtaggtggtaggtatatatgtggtatttatatatatatgtgagtgttcgagttagtttagttttaatagataaattagtaagatataataaaagaggaaaaggtatcgagtattagaattaagtggaagagggggttttttttttttttagttgtgtttgtatgtagttttattttgatgatttttttattggaggtaattaaattcgttggaatgtttattcgaaatgagcgttcgataatagtcgtatcgtttggaatgttaattacggtgggaatagttttttggaagtcggagagaattgagtgtatggacgttttaagttggtttttttagttttttatagtttttgagggtttattgggttagtgggtttgagttatagttatagataggaggaggagaaaggtttgtttttagagggggtgtagtagttagttgtttatagatatttttatttaggttagtgtttgtttaagttattagttgttaaggaagaaagtaaatgatgtggttttagggttggatttttattttttgtatagttgttttattttagagtatttagagtttataagagaagaatagatttaaatatttaaattatgttggcggttttgagattgtatatttttttagtgttttgttaagatattttgttttaattagagttttttatttttgtgttttttagtagttatttagcgatggaaattgatggaaattgattggtttagtaagtgtaaaataatattgaagtttgaaattttatataaaaataaaacgtaaaatattttattagtaatttaaagggaaggttgaagagatggtttagtggttaagagtatttgttgtttttttagaggatttaggtttaatttttagtatttatatggtggtttataattgtttgtaattttagttttagggaatttgatttttttatatagatatgtatataagtaaaattagtgtatataaaataagtgaatatattatcgaaaagtaatttaaagggataatatatattgaaattatagcgtattaaattatttatattattaaatgaataaaaaaattttgtaaaatataaataggtggaattaagtttaattgtttgttttgttgtgagagggaattttaaatgaatgatattagttgatattttgtttttaagtagttcgtttttagaggaatgttagagatttttttgagttatatttttagtttagtaaagttataaatatacgtttaaaatattatatttaattttttttttttttttttttttttttttttttatttttattaattttattttattttaggtttttgagatagggtttttttatgtagttttggttgttttagaatttattttgtaaattaggttagtttagtatttatttgtttttgtttttagagtgttgagatttaaggagtacgttagtatatttagttgagttattttttatgtatgaatggtttgtttgtatgtatgtgtattacgtgtatgtttgtgtttttaaaggttagaaaacgttttagattttttggagtcgtatttatggataattttaagttgttatatgagtgataggaattgaatttaggttatttgtaagagttataaataaatgttttaaattattaagttatttttttagattttttaaatttttttagatcgagtcgattttttttagtgagggttaattgagttt

SEQ ID NO: 2267 - DNA, 5371 bp, Artificial Sequence
  chemically treated genomic DNA (Homo sapiens)
ggattttttttagttggttagagagatagatttttttgtgtttattaattttttaagaatgtttgtttttttttttttttttaaggtttgtttataggggtttgagattagttagaaaagttaggtaattttttagggattgggagcgaggtttttcggtcgggtttgggtttagtttttgtgggtagtgtagtgtcgagttttattttttaagtcgtgttttgtttatagttttagattttgattttgtattttagttcgggttggcggatagagggttggaaataagacgttttagaattaggagtttttttttaggaaatagtattttgtgttttcgtattgtagttgtttggtttttttagtagtttggtattttcggtgagtggtagatgtatttttgagttggggataagggttgggagaggggagaggtaaaggattttatgtttttttaatgttaaagatagggtttaatattatagtttaaggtaggtgataggaaaggagagatttagttttttaaatatttagtagagagattataggtaagtgatttttttttttttaagttttagtttttttatttggaatatggggattataattttttttttatagcgtgagtttgagtgttaaaagaggtggtgtatgtaaagtgtttagagtagatttaggtatatagtaagtatttaaatggtagttattattatttttggtgggggagttggtaggttggtttttaaatttttatagtttttgttttattttaaggataaattttgtaaataataattttatgagaagtagtcgtgtggtgtaattagggagaattaattatgtttattttaaatgttttatttttggtttattgattttttttttttaaaaagaagttttttatattttttgttatgggtatataataattaaaggtattagttgttttagattgttttttaggggataagggaggttttaggtagataaatgtaagattgaaagataagtagaaagtattaagtggtaattgtatgttaattgtttaaatatttttttggagtagtgtagaaagcgtcgatagaattgggtttaggttcgaatgttgttttatattgattgcgtaattttgggtgggtgattttttttttttaaattttagttttagtttttagaatgagggcggtaattttttttatttttaggagagtagttgagaggattgagaggattatgtcggtattgtatttataggtgtttggtaagtggtagagattaaaatatattggttttttttttgttttatatttatatagatattttaattatatatatatatatatatatatatatatatatatatataaatataataattttagttgtttgtattttttgggatatatattttaagtttgttgggttgaagtaatgatgtaaaatagaggagaacggtaatattaataaaaatattagtaataatacgaaaatgtttaatcgaataattgagttgggtgcgtttaagtttaaaagtttattatttatacgtatgaatgattttatttaaggttggatttgttatatttgataatttgtttttggtttgttatgagggttttatgtatttattttgtattttaaaatatatatatatatatatatatatatatatatatacgttgttataattagtgttaattttgatttatattttgaatttttttaaaaaaagataattgatttaggatttatatttttttttttttaaattttttttttttttttttttttttgatagagttttatttttgttatttgggttggagtgtaatggtatgatttttgtttattgtaatttttattttttaggtttaagggatttttttgtttcggtttttcgagtagttggaattttaggcgtgtattattatgttaagttaatttttttgtatttttgtagagatagggttttattatattggttaggttggttttgaatttttgattttaagtgatttgttagtttcgattttttaaagtgttggaattaaagacgtgagttattgtgttcggtttttttgattttttattttatttttattaatattttaaaaatttttataggtattttattttattttattttattttattttatattatattttatgtttgaaatgtaggattttgaagttttagttgtttttatttatcggtttgatttttagattttttaaattatgtgatttattggtaagtatggtaatttaagtatttaggtttatgagttaggttgggttggggtttgttttttattatttgggtgtttaggagttgatattttagtgaggagataataaggtaaggagttttgttagtttttataaaagtttatagatgaggtcgggtatggtggtttacgtttgtaattttagtattttgagagtttgaggttagtaaattatttgaggttagaagtttgagattagtttggttaatatggtgaaatttgtttttattaaaaatataaaaattagttaggtatgttggtgtatgtttgtaattttagttatttaggaggttgaggtaggagaattatttgaatttaggaggtagagtttgtagtgagttaagattgtattattgtattttagtttgggcgataagagtgaaattttgtttcgaaaaaataaagtttatagatgaggaaattgaggttcgattaggattaattaatttattttggtttgtttgggattttgatgtattgatttttagtttgaaagtttgtattttgggaggatttttagttttgggtaagttggggaggttggttatttttatttagttaagttgagtaatttgtttagggttatatggttggtgtgtgtttaagttaggttgcgaatttgggtttgtttgatttttagtttgggttatattgttttttagattttttatggagaattaggaaaaatatagaaagttttttatttttttgtttttttattgttaatatataaaaatggttaagcgggtgggtgtagtggtatatatttgaaagtttagcgttttgggaggttgaggggggaggattgtttgagtttaggaattggaggtggtagtgagttatgattgtgttattgtattttagtttgggtgatagagtgagattttgtttttttaaaaaaaaggaaagagtggttagtttttcggaaattatgtagttagttaaaaagtttagagaggggatttaatttagttaggtcgtatagtaaggtagaagtgaagttaggtttgattttgttttttttttttttttttttttttttttgaggtagaatttcgttttgttgtttagattggaatgtagtggtgcgaattcgattcgttgtaatttttgttgtttaggtttaagcgatttttttgttttagtttttcgagtagttgggattataggcgtttgttatcgcgtttggttaatttttgtagtttttagtagagatggggttttattattttggttagattggttttgaagttttgatttcgtgatttattcgtttcggttttttaaggtattgggattataggcgtaagtaattgtagttggttttttttttttttttttgtttttgtaatgtttttgttttatgtgattttttaaaatgttaggagataggaaggaggttgttgtgtgttgagggtttatttgtgttagggtggtaattaagaatttttgttaaaattttttatttaatttttaaaatgattttgtgagattgggattaattttgttttgtagatgaagagtttgtgtttttagaggtaaagtatgggggaagagggaagagagaagattaagggtttttgagaggggttgttatttaagttttagtatttaagttcgggttcgaagttggaaggagaattgtttagaggaacgatatttttttgtttgttggttttatttttaatttggtttttgaaattttaatagagtttagtttttgtgggttggagtcgtttttttttttttataaaattaggttatattaagaatgtttcgttgtttagggttataggtcgatggttgttaggagttgaggtttgtaggaggagagttgtgagtgaagaggagggaaagttgaatttggtttttttgggtataaataatttttttgttttgttttagtaggagtttgtagaatatttttttgttgtgcgggtttaagtagttttaaggttaaaagttggtaggttttttaaattttttagggtttaattagttttgtgttttaaggtaggtggagttttgtgttggaagattaagttttgaggttagatattgcgtttgttatgtttatagttgtatttgttagttgttagtttgggatatggtagttgtgtattaagcgtgtgttgagttatttaaattgaattagttatagttgtattatttaattggttgtgtgattttaggtaagttatattatttttttgaattatagtttttttttttgtaagacgggattgataatagtagtttttattttatgagagtgttgggagatttggatgaatggatgtttgtgaagtatttagtgtcgggggttagttggtttatagtaggtgttttataaatgttagtatattattttttttgtattaggtagtttgttaaatttgttacgtttggtattttgtttaattttttatttatttttttaagtataggttattagaggttgaagtattttgtttaaagttaacggttagtaggtggtagagttgagttttgaagttagagtttatcgtattaattatcggtttatttagtttatagttggtcgtgttttttgttgggttttttttatttttagtttagaaattgggtgtttggggacgttttttagagaaagttgtattatttattagtcgtgtgattgtggttaagtttcggttatttttttatattttagtgtttttatttgtaaaacgggaataatgatattttttttttttaggggttatcgggaaggttaaatataaaaagggtttggtggtgtttggtattttttaagtttttagtggatggtggtaatggcgttaaggatgatggagatgatggtgatgatggtgtgttttaattttttttttttataggttgttgtaatgcgtgtggtggtgattggagtaggagttatcgggttgtttatcgttttttgtatttatgagcgttattatttagttttgtagttattggatataaaggtttacgcggatcgttttattttatttattattatcgacgtggttgtcggtttttggtagttttatttttttgattttaataatttataggaggcgt

SEQ ID NO: 2268 - DNA, 5371 bp, Artificial Sequence
  chemically treated genomic DNA (Homo sapiens)
acgttttttgtgggttgttggggttagaaaggtagggttgttagaggtcggtagttacgtcggtggtggtgagtggggtgaagcggttcgcgtagatttttatgtttagtggttgtaggattgagtggtagcgtttatggatgtagagggcggtggatagttcgatgatttttgttttaattattattatacgtattgtagtagtttgtgggaaggaagggttgaggtatattattattattattatttttattatttttagcgttattgttattatttattgaaggtttagaaggtgttagatattattaagttttttttatatttgattttttcgatgatttttaggaggaaggaatattattgttttcgttttgtaaatggaaatattgaggtatggagaagtgatcgagatttggttatagttatacggttggtgaatgatgtaattttttttggggagcgtttttagatatttagtttttgggttgggaatagaaaagatttagtagagggtacgattaattgtaggttgggtaggtcggtggttagtgcgatgggttttggttttaggatttagttttgttatttattggtcgttaattttgggtaagatgttttaatttttaataatttatgtttgaggggatggatgggaaattgaataagatgttaaacgtaataaatttaataagttgtttgatgtaaaagaagtaatatattgatatttgtggagtatttattgtgagttagttggttttcggtattaagtgttttataagtatttatttatttaagttttttaatatttttatgaggtaggggttgttgttattagtttcgttttatagaggaggaaattgtggtttagagaggtgatgtgatttatttgaagttatatagttagttaaatggtatagttgtgattgatttaatttgagtaatttaatatacgtttaatgtataattattatgttttaggttggtagttagtaaatgtagttatgagtatgatagacgtagtgtttggttttagaatttggttttttagtatagaattttatttgttttggggtatagggttgattgggttttgagaagtttagaaggtttattagtttttaattttgaagttatttaagttcgtatagtagggaaatattttgtaggtttttgttgaggtagaataagagaattatttgtgtttagaagagttaaatttaatttttttttttttttatttataattttttttttgtagattttagtttttggtaattatcggtttgtggttttggatagcgggatatttttaatatggtttagttttataaaggagggaaaacggttttagtttataagaattggattttgttggggttttagaagttaagttggagatagaattaataaatagaaaggtatcgtttttttaggtaattttttttttagtttcgagttcgagtttggatattggggtttaggtgatagttttttttagggatttttggtttttttttttttttttttttttatattttgtttttggagatataagttttttatttgtaaaatagggttaattttaattttatagggttattttaaggattaaataagaagttttagtaaaagtttttggttattattttggtataaataggtttttaatatatagtagttttttttttgttttttagtattttgaaaaattatatagaataaagatattgtaggaataaaaggagagagggaggattagttgtagttgtttacgtttgtaattttaatattttgggaggtcgaggcgggtggattacgaggttaggattttaagattagtttggttaagatggtgaaattttatttttattgaaaattataaaaattagttaggcgcggtggtaggcgtttgtaattttagttattcgggaggttgaggtaggagaatcgtttgaatttgggtagtagaggttgtagcgagtcgagttcgtattattgtattttagtttgggtaatagagcgaaattttgttttaaaaaaaaaaaagaggagaagagaaaggtagagttagatttggttttatttttgttttgttgtgcgatttggttaagttaaattttttttttgggttttttgattggttgtataattttcggagagttgattattttttttttttttttaaagagataaggttttattttgttatttaggttggagtgtagtggtataattatagtttattgttatttttaatttttaggtttaagtaattttttttttttagttttttaaagcgttgggtttttaggtgtgtgttattgtatttattcgtttgattatttttatatgttaataatgagaaggtagaggaataaagggttttttgtattttttttaattttttatgaagaatttaagagatagtatggtttaggttgagagttagatagatttaggttcgtagtttgatttgggtatatattagttatgtaattttgggtaagttgtttaatttgattgagtgagggtgattaatttttttagtttgtttaggattgagggtttttttaggatgtagatttttagattaaaagttagtgtattagagttttaggtaaattaggatgagttggttaattttaatcgaattttagtttttttatttataaattttattttttcgagatagagttttatttttgtcgtttaggttggagtgtaatggtatagttttggtttattgtagattttgttttttgggtttaggtgatttttttgttttagttttttgagtagttgggattataggtatgtattaatatgtttggttaatttttgtatttttagtagagataagttttattatgttggttaggttggttttaaatttttgattttaggtgatttgttggttttagatttttaaagtgttaggattataggcgtgagttattatgttcgattttatttataaatttttatgagagttgataaagttttttgttttattgtttttttattggaatattagtttttggatatttaggtggtgagaggtagattttagtttagtttgatttataagtttaggtgtttaaattgttatgtttgttagtaaattatatggtttgaaaaatttgagaattaagtcggtaaataggaatagttgaagttttagagttttgtattttaaatataaaatataatataaaataagataaaataaaataaaataaaatgtttgtaggaatttttagagtgttggtaggaatagaatggaaaattaaaaaggtcgggtatagtggtttacgtttttaattttagtattttgggaggtcgaggttggtagattatttgaggttaggagtttaagattagtttggttaatatggtgaaattttgtttttataaaaatataaaaaaattagtttggtatggtggtgtacgtttgaaattttagttattcgggaggtcgaggtaggagaattttttgaatttgggaggtggagattgtagtgggtagaaattatgttattgtattttagtttaggtgataagagtgaaattttgttaaaaaaaaaaaaaaaaaaaaaaaatttaaaaggaaaaaagtgtgagttttaagttaattatttttttttaaaaaaatttaagatatgagttaaagttgatattgattatagtaacgtgtgtgtgtgtgtgtgtgtgtgtgtgtgtgtgtgttttaaaatataaaataaatgtatgaggtttttatgataagttagagatagattgttagatgtggtagatttagttttaggtaaaattatttatgcgtgtaggtaatgagtttttggatttaaacgtatttagtttagttattcggttggatattttcgtgttgttgttgatgtttttattagtgttgtcgtttttttttgttttatattattattttaatttagtaagtttggagtatgtattttagaagatgtaaatagttgggattattatatttgtgtgtgtgtgtgtgtgtgtgtgtgtgtgtgtgtgtgtgattagaatgtttgtgtaagtgtggagtaggaagggaattaatgtattttggtttttgttatttgttagatatttgtagatgtagtatcgatataatttttttaatttttttaattgtttttttaggagtagggaaggttatcgtttttattttggaggttgagattgaggtttagggaggagaagttatttatttaaggttacgtagttagtatgggatagtattcggatttagatttagttttatcggcgttttttgtattgttttaaaaaaatatttaggtagttggtatgtagttgttatttgatgttttttgtttgttttttagttttgtatttatttgtttaggattttttttgttttttagaaggtaatttgagatagttgatgtttttgattgttatgtgtttatagtaaagaatatgaaagatttttttttaaaaaaaaaaaattagtaagttagagatgaggtatttggaatgaatataattagttttttttggttgtattatacggttattttttatgaagttgttatttgtagagtttatttttgaaatggaatagaagttataaaagtttgagaattagtttattaatttttttattaaaaataataataattattatttgagtatttgttatgtgtttagatttgttttaagtattttatatgtattattttttttaatatttagatttacgttgtaagaggggagttatgatttttatgttttaggtgaagaaattgaggtttggggagggaaaaattatttatttatggtttttttgttggatgtttgagaggttggatttttttttttttgttatttgttttaggttgtaatgttgagttttgtttttgatattgggaggatatgaaattttttgtttttttttttttttaatttttgtttttagtttaaaggtgtatttgttatttatcggaagtattaaattgttggagagattagataattgtagtgcggggatataggatgttattttttgaggggaagtttttgattttggagcgttttgtttttagttttttgttcgttagttcggattggagtgtagggttaaagtttggagttatggatagggtacggtttgaggggtggggttcggtattgtattgtttatagagattggatttaggttcggtcgggagatttcgtttttagtttttgaaaagttgtttgatttttttggttgattttaagtttttgtggataggttttgggggaaggagggagggtaggtatttttggagggttgatgagtataagaaggtttgtttttttggttagttggagaggattt

SEQ ID NO: 2269 - DNA, 2037 bp, Artificial Sequence
  chemically treated genomic DNA (Homo sapiens)
tgtttataaggtataggtgaggaggttttggaattaatttgaggtatgaaggtgaggtgtttttaggcgacggaggtggtatgttttgatgggaaagttaggttttcggaggttgagattttttttaaggtttattagagaatttttaagagtgttttttttttggtttgggagataattttatattaatgttatattttattgtataggtgattatgtatttggtttttatttgtttgggttgtgggtgggggcgaacggtgtttttttgggtgtaattagtggggaggggtttatggtttgagtttggttttgtaggatggtttggttattgtggggtagagagtattgtttgcgagggttaggggaaggttggtattttttttaaattttacgttcgtgtaaagatatagttatttttttttatagcgtagagtttagagttgaagtagtttttagatttgttgttatgggtatttaaggatttaaatgttgttgttagtttatgatatgaatgtgtttttaaggttagattttgggtttttttagagagacgagaaataggagggaaaaggaaggaagggagggaggaggttggggaggagggatagtttttagtttagttggagagatttgttaatttagtttggggggtggagttggagggattaagtagaatgttttgaaggtagttgtttttagtttatttgcgggagaggataggagggagaggtgtcgtggtgagattgattttcgggtttacgggtggatgatggtaaaggttttgtggtaggtgtgggagaagtagggttgcggttagttgttttgagaggttttaaatttaggttagatttgttttgggtaagaggaagttgtgggtttgggagttttagagataggggagtaggtttgttatttatttttttttttttaaaggttgttatttttagtagtgtattttgtagtttgtttattttttgtgtagttttagtttcgtttgtttttagtaatgtattttacgtttatgttttttattttttatgatgttttcgcgttttttggagtagtagtggtattagttggaggttgtggaaaaattgagaggagataaaagtgggaagagtaggtcgtggagagagtgtttaaatatagggattatttggagattgttttatttttggtttgaaatgggtttatttgttagtattgtataaacggttttgttcgttaggttaggtttgtagtggttacgggtttattttttattggttagtttggagtagtttttcggattttagtttgtttattcgtgggtagaggcgacgtagattttattttattggggattgggttagatagtttgtgaggtagttagttggtgtttggttagagggtgtttgaaaggttttttggttgtagggtgtatttgtttttgggatagttttttagagttattttagaagggatagtattcgtttgtttattttaatttttattgatgacgtttatgtgttattagtgttaattagaggagggtagtaggttgagtgtttggtttggggcgtaagtttgtgggagggaaaattggatttttcgttagataaatgtgattattcgtgttgtttggatttattttatttaggattagggtataaatggttaggtgggattagagagtttattttagttatgttcgtttttagtcgttgggttagtttgttcggttttagtatgcgggaggtagtttttatgtatagtatagtagtggttatttttttggttattttggtggtcgtattgtagggttcggtttttcgtgagagtttttttttttattatatttttttggattcggaggggtttttggagtttttatggaatgttagttatatttaggaggttatttatttttagtttttggtgcggaggtttaaggttggcgttttgtttgggatgttcgatcgtggcgagtttgagaacgtagatttcgtggtgttttggatcgatggggatattgtttattttgcggtgagtttt

SEQ ID NO: 2270 - DNA, 2037 bp, Artificial Sequence
  chemically treated genomic DNA (Homo sapiens)
gagatttatcgtaaaataggtagtgtttttatcggtttagagtattacgagatttgcgtttttaagttcgttacggtcggatattttaaataggacgttagttttgagttttcgtattaggagttggaaatggatggttttttgggtgtagttgatattttatgagagttttagggattttttcgggtttagggggatgtgataggggagggggtttttacggggagtcgagttttgtagtgcggttattaggatgattaggaagatggttattgttgtgttgtatatgaaggttgtttttcgtatgttggggtcgggtaggttggtttagcgattgagggcgggtatggttggggtgagttttttggttttatttggttatttatgttttggttttgaatggggtgggtttaggtagtacgggtaattatatttgtttagcggggaatttaatttttttttttataagtttgcgttttaggttaagtatttagtttgttgtttttttttaattggtattaatgatatatggacgttattagtgggagttgaagtagataggcggatgttgttttttttgagatggttttgaagagttgttttaaaagtagatgtattttgtagttaagaggttttttagatattttttggttaggtattagttgattgttttataggttgtttggtttagtttttagtgggatggggtttgcgtcgtttttatttacggatgagtagattgaggttcgaggagttgttttaggttgattagtgaaggataggttcgtagttattgtaggtttggtttagcgagtagagtcgtttgtataatattagtaggtgggtttattttaaattaaaaataagataatttttaaatagtttttgtgtttagatattttttttacggtttgttttttttatttttgtttttttttaatttttttatagtttttagttggtattattgttgttttagaaggcgcgagagtattatagggagtgggggatatgggcgtggggtgtattgttggggatagacggagttggagttgtataggggataggtaggttgtagggtgtattgttgggggtgatagtttttaaggaaaagagggtgagtgataggtttgtttttttgtttttgaagtttttaaatttatagtttttttttgtttagagtagatttggtttgaatttgaagttttttagggtagttggtcgtagttttgttttttttatatttgttataggatttttgttattatttattcgtgggttcgagggttagttttattacggtattttttttttttgttttttttcgtaagtagattgagggtagttgtttttaggatattttgtttgatttttttagttttattttttaggttgggttgatagatttttttagttggattagaagttgttttttttttttagttttttttttttttttttttttttttttttttgtttttcgtttttttggagaaatttagaatttagttttaggggtatatttatgttataggttgatagtaatatttaggtttttaaatatttatgatagtaggtttggaggttgttttagttttgagttttacgttgtagaaaggaatgattgtgtttttgtacgaacgtgaaatttggagaaagtgttagtttttttttggttttcgtaggtagtgttttttgttttatagtggttaggttattttgtaaagttaagtttaggttatgagtttttttttattgattgtatttagaggggtatcgttcgtttttatttatagtttaggtaggtgaggattaagtgtataattatttgtgtaatagagtgtggtattggtgtgaaattgttttttaggttaggggaaagatatttttgggagttttttggtgagttttgggaagggttttagttttcgaaggtttggtttttttattaggatatgttattttcgtcgtttgagagtattttatttttatgttttagattagttttaaaatttttttatttgtgttttgtaagta

SEQ ID NO: 2271 - DNA, 1391 bp, Artificial Sequence
  chemically treated genomic DNA (Homo sapiens)
atttgttaaataaatttattttttttaattttttttttttttttagtttattttttatgaatgtcggatagttgtattagtttggtggggaaagggtttgatgaatagtataaagatattggttgttttttggaggttgtttttttaaaggagaattttagtttattttggggggaggggatgtatatattagagtaggaaagagggtttggaataaaatgaaaatattttttttttatagttattgtattgaaatgtaaagattgttttttaagttggagatgttaattttgggtagttttttttgttttttttaaggggaattttgttaggttatggatttatttataattgttagttatgtgggtatgtgtgaggaaatagatgttagttttaatgtatttagttcgaagttttaatttgataggagttattgttagtaagttttaggatttttagttattttaaaattttttttttttttttgtttggaatagtgttaagagtgtttttttttttattttttatttttaatttttataattattagtattttcgtttagttttttttttttttttattaagattaatatttttgtaggttaggggtaagtagtagatgggttatagttttttttaattatttttttttataagtagtagattgtaattttggattttggttaatatttaaaaattttttttttttttttttttttttgttttttttgtttttgtttttttttatttttattttttttttttacgtttaggtttttgaggttttattaaaatatggaatttgattttggatattttgacgaaagagataagatatttaggaatatgcgaggttttcggatgaatgggttgtttagttttatttatagcgtttattgtagtttttatcgaattagaattttgtaggtattgagtaatgagaagaaagttaagaaggtacgtttttatcgtaatggggatcgttattttaaggggattgtgtacgttgtgttttttgatcgttttcgtagttttgacgttttgttggttgatttgacgcgatttttgtttgataatattaatttgttttagggagtgcgttatatttatattattgatggatttaggaagatcggaagtatggatgaattggaggaaggtaatttaaatagtgggtggtggtcgttggtgggaggtggtattattggttatggttatatttttcggttgttttgaaaaaaaattaggtaatgtattttttaaaatatcgggttgattgatgtttaaatttttaatgttatagatattaatagaatattagtaattattttttatttttgttgaagttgaaattgtgaatggtggtgaattatgtttttgtgtttatttgt

SEQ ID NO: 2272 - DNA, 1391 bp, Artificial Sequence
  chemically treated genomic DNA (Homo sapiens)
gtagataggtataaaggtatgatttattattatttataattttaattttagtagagatggaaggtgattgttaatgttttgttgatgtttatagtattagaaatttgagtattaattaattcggtgttttgaaaaatatattgtttaatttttttttaaagtaatcgaagaatgtaattataattaatgatgttattttttattaacggttattatttattatttaaattatttttttttagtttatttatgttttcgatttttttggatttattaatggtgtaaatgtaacgtattttttgaggtaggttgatgttgttagatagagatcgcgttaggttagttagtaaggcgttaaagttgcgaaaacggttagaggatatagcgtatataatttttttgaagtagcggtttttattgcggtagaaacgtatttttttggttttttttttattatttagtgtttgtaaggttttggttcggtagaagttatagtgggcgttgtgagtggggttaggtaatttatttattcgggagtttcgtatgtttttggatgttttatttttttcgttaaagtgtttaaaattaagttttatattttggtggaattttagagatttgagcgtgggagaaagggatgggggtgaagagaggtaaaaataaaaaggataaggagaagggaaaaaagaagggatttttaaatattagttaagatttaggattgtaatttgttgtttgtggaaaagaatggttgaaaaaagttgtgatttatttgttgtttgtttttgatttgtaggaatattgattttaatagagaagaaggaggggttgggcgggggtgttggtggttgtgggggttgggagtaagagatagagagggaggtatttttggtattgttttagatagaggagaaggggagattttgaaatagttgaaaattttgagatttattgatagtggtttttattaaattggaatttcgggttaaatatattaaaattggtatttgtttttttatatatgtttatatgattaatagttgtaaatgaatttatagtttgataaaattttttttgaagagaatagaaggagttatttaaggttagtatttttagtttaggaagtagtttttgtattttagtataatgattatgaagggggagtgtttttattttattttaagtttttttttttattttaatgtgtgtattttttttttttagaataaattaagatttttttttaaagggatagtttttagggaatagttagtgtttttgtgttatttattaaattttttttttattaagttggtgtagttattcgatatttataaaaaataagttggggggaaaaaagggattagaaaaaataagtttatttaataagt

SEQ ID NO: 2273 - DNA, 2067 bp, Artificial Sequence
  chemically treated genomic DNA (Homo sapiens)
ggtgaggtggtagttatttggagtattagttatgttggaggttgaggcgggaggattttttgagtttaggggtttgagattattttgggtaatatagtgagatttcgtttatataaaataaataggaaaaaaaaaataagatattggtttttttaattttttaagtgttaaaaaaaaaaaaagaaaaagaataataaattttatttggaaaggggatatggtattgttaaaatgtagatttttgggtatttagagattttaaattggtagggttagggtgggtttaaaattagtaagtgattacgtggttttgaagttagtggtttaaggattatttttgtagaatcgtggtttttttgttatagtttaggtagtttttggtttagtttttgttttttttataattttttttagcgtttgttttgggttagattagtgttgggaggagtcgttattgagtttttagattggtaggggaggtagatggagaaaaggagtgtgtgtggttagtattggagtagaggtagtagtgggtaatagaggaagtgagtaaatttttgggagggttttttagaagtgatgtgttttttttttttgttttagagataggatttcgttttgtcgtttaggttggtgtgtagtggtatgattatagtttattgtagtttcgatttttcgggtttaagtaatttttttattttagttttttaagtagttgggattacgggtatacgttattatgtttggttaatttttgtattttttgtagagatgggtttttattatgttgattaggttggtttcgaatttttgggtttatgcgatttatttcgttagttgattatagggatttcggtggtgagttatcgcgtttagacgttattttatcgtattgtaaacgtttgttatttttttgtttttttgtttattggattgtgagttttttagggttacgaattgaggatggggtatagagtaagttttttaaacgtttgttgaatgagtgagggaatgaatgagtttaagtagatgttatacgttggttgttggagattttggttaaaatgggatttgtaggaaagttcgacgtttttttcgttatttttaggtatcgttttttagtttgggttttgggtgagcgggatagggttgggtgtaggattaggataatgttatgggtgaggtaagttgaggatggaagaggtggttgatggttgggttgtggaattgatgattttgaaaagaagaggggatagtttttggaaatttaagttgaggttgttgggggttataggttgagggttacgtgtagaagagaggttttgttttgaatttgtattatagaaaggttagtgggatgcgggagcgtcggggcggggcggggtttatgttttcgtgtttttacgtttttagtaggggacgttcgggttgggggcggggagttagatcgcgtttggtattattcggataaagtttgcgcgcgtttcgtttcgttattggtcgtatcgtttcgcgtcgtcgttttatttcgtttttcgtcgtcgggttcggcgcgttaaagttaataggaatcgtcgtcgttgttttcgttacggtcggggtagttaattgtggcggcgttcggcggttcgtggttttttcgcggtaaaaaggatttggcgcgtaaaagtggtcgggattttgtaggtagcggcggtcgggggcggagcgggatcgagttttcgtcgaggtttgtcgttatgggttcgcgtcgtcgtcgtcgtttgttattcgggtcgcgcgggtcgtgagcgttatggttttggtcggggtttttgcgggcggtttatgcgcgtcggcgttggaggttttgttcggggtcggcgcgttgcggttgttcgatttttcgtagatcgttattattttcgtcgcgtaggacgttagcgtttcgtcggtttttatcggtttcgcggcgttcgtcgtcggtttttgcgattttgatttgttgtttttcgttatatcgtaggcgtttcggtttatatttagtgcgtcgcggttcgcgttcggtcgttcgtcggtacggatttt

SEQ ID NO: 2274 - DNA, 2067 bp, Artificial Sequence
  chemically treated genomic DNA (Homo sapiens)
ggggttcgtatcggcgggcggtcgagcgcgggtcgcggcgtattgggtgtgggtcggggcgtttgcggtgtggcgaagagtagtaggttagggtcgtaggggtcggcggcgggcgtcgcggggtcggtgggagtcggcggggcgttggcgttttgcgcggcggagatgatgacgatttgcgaggagtcgagtagtcgtagcgcgtcggtttcgagtagggtttttagcgtcggcgcgtatgggtcgttcgtaggggtttcggttaaggttatgacgtttacggttcgcgcggttcgggtgataggcggcggcggcggcgcgggtttatggcggtaggtttcggcgagggttcgatttcgtttcgttttcggtcgtcgttgtttgtaaagtttcggttatttttacgcgttaaattttttttgtcgcgaaagagttacgagtcgtcgagcgtcgttataattggttgtttcggtcgtgacgggaataacggcggcggtttttattggttttaacgcgtcggattcggcggcgaggggcgagatggggcggcggcgcggggcggtacggttaatggcggggcggggcgcgcgtaggttttgttcggatggtattaggcgcggtttgatttttcgtttttagttcgggcgttttttgttggaggcgtggggatacgggaatataggtttcgtttcgtttcgacgttttcgtattttattgatttttttatagtgtaggtttagaatagagttttttttttgtacgtgatttttaatttgtagtttttaatagttttagtttagatttttagagattgtttttttttttttttaggattattagttttatagtttagttattagttattttttttatttttaatttgttttatttatgatattattttaattttgtatttagttttatttcgtttatttagagtttaagttgaagagcggtgtttggaaatggcgagggggacgtcgggtttttttgtaagttttattttagttaaaatttttaatagttaacgtatagtatttgtttgaatttatttatttttttatttatttaataaacgtttggagagtttgttttgtgttttatttttaattcgtggttttaaggagtttatagtttagtagataggggaatagaaaggtaatagacgtttataatacgatgaagtggcgtttgggcgcggtggtttattatcggaatttttgtaattagttggcggggtggatcgtatgagtttaggagttcgagattagtttgattaatatggtgaagatttatttttataaaaaatataaaaattagttaggtatggtggcgtgtgttcgtagttttagttatttgggaggttgaggtgggaggattgtttgagttcgagaagtcgaggttgtagtgagttatgattatgttattgtatattagtttgggcgatagagcgagattttgtttttaaaataaaaaaagaaaatatattatttttagggagtttttttaaggatttatttattttttttattgtttattgttgtttttgttttaatgttgattatatatattttttttttttatttgttttttttgttaatttaggagtttagtagcgattttttttaatattggtttggtttagagtaggcgttgagaaaggttatgaaagaaatagaggttaagttagaggttgtttagattgtgataaggagattacggttttgtaagggtggtttttaggttattggttttagaattacgtggttatttgttaattttgggtttattttggttttgttaatttaaaatttttaggtgtttaagaatttgtattttaataatgttatgttttttttttaggtgaaatttgttattttttttttttttttttttttgatatttagggaattagaaaagttagtattttatttttttttttttatttattttatatagacgaggttttattatgttgtttagggtagttttaaatttttgggtttaagagattttttcgttttagtttttagtatagttggtattttaggtgattgttattttatt

SEQ ID NO: 2275 - DNA, 1233 bp, Artificial Sequence
  chemically treated genomic DNA (Homo sapiens)
tagttgaaggggggcggggagcgcgcgggtagaggaaggagggtgttttcggttgaggatttttttcgaagttttttatagtaattttgttttttttagggtttatttttttagttttaaggtgtttaaaatatttaaataaataaataatttaaatttgtttcgttttcgtttttgtataaatagaatagattttttaaaaaagtaatacgtatttatttttatgattagttatttttttttattaagtaatttagaaaaaagtagttagttttcgtgaatgtatgtagtttttttttttttcgttgtttttttttgtttgcggttttgagttgttaagaaagtgagtaggggtttgattgtagtgtttcggtttcgttcggttttttttcgaagtttaatttttcggaatggtttttaaataagggttagggaggcggacgcgtcgggtatcggattttcgttttttttggaaagttttagagaatcggaattttttttcgtttcgggaggttgagtcgtagtttggagtagttcgtttttttgttgtggttgtgattgggtttatggcgcgttttttttttcgcgatttttgcgtttcggatttaggttgtagttagggtcgcgcgttcgggattttagggattttcgtcgtttgcgagttggaagtcgcgagttcggcggagttcgcgcggtcgagttcgtgtatgtaaattagttatgtgacggtaaaagtcgtttggtttagttttgttttttagtttatatatgggtagcgacgttacgggtattgaagatttgtttataaatatttagagtaatatttttcgtttaattgagcgaggagtaattgattaatagttcggcgaggggatttattgattgttataataatattatattagtaatttttggttttttagtagtcggaatatagataggagagagttagtggtaaatagatattttttttattttttaaaaaatagtaatttgtttgttatttttatttttgttgattttttttttttggtgtgtgtggtggttgtttttaagtgtggagggtaaaaggagatattattttaggtttagtttaatttttttttaaaacggtttttttgatattttaggtagcgagggagttgggtttttaggttgtgcgaggagtaaatgatgatcgttaaggtcgtagataaaattttagtaatttttagtggttttgtgtattagttg

SEQ ID NO: 2276 - DNA, 1233 bp, Artificial Sequence
  chemically treated genomic DNA (Homo sapiens)
tagttggtgtataaaattattgagagttattgggattttgtttacggttttggcggttattatttgtttttcgtataatttggagatttaattttttcgttatttggagtgttagaaaagtcgttttggagaggggttggattgagtttgggatggtatttttttttgttttttatatttaaaaataattattatatatattaagaaaaaaaaattaatagaaataaaagtagtaaataagttgttgttttttaagaaataagaaaaatgtttatttgttattgatttttttttgtttgtgtttcggttgttgggaagttaggagttgttggtgtagtgttattataatagttagtgagttttttcgtcgagttattaattaattgtttttcgtttagttagacggaaagtgttgttttaagtatttatgggtaggtttttaatattcgtgacgtcgttgtttatatatggattgaggaatagggttgggttaggcggtttttgtcgttatatggttgatttgtatatacgggttcggtcgcgcggatttcgtcgggttcgcgatttttagttcgtaggcggcggggatttttggggtttcgggcgcgcggttttagttgtagtttgggttcggggcgtagggatcgcgggggagagggcgcgttatggatttagttatagttatagtaggagagcgagttgttttaggttgcggtttagtttttcggggcggggaggaatttcggttttttgggattttttaaaaaaggcgaagattcggtgttcggcgcgttcgtttttttagtttttgtttgggagttatttcggaaaattaaatttcggaaagaaatcgagcggagtcgagatattatagttaaatttttatttatttttttggtagtttaaaatcgtaagtaaaaggaggtagcgaagaaaaaaaaagttatatgtatttacggaagttgattgtttttttttgaattatttggtggaaagaagtggttggttataagagtgaatgcgtattgtttttttggaaagtttgttttatttatataggagcgaaaacggaataggtttgggttgtttgtttgtttaagtattttgggtattttgggattgggagggtaaattttaggaggagtagaattattgtggggagtttcgagagaaatttttagtcggagatatttttttttttttgttcgcgcgtttttcgtttttttttagttg

SEQ ID NO: 2277 - DNA, 6000 bp, Artificial Sequence
  chemically treated genomic DNA (Homo sapiens)
gaattttgttttttggaggatgaagttgtgttatatagttgaaattttaatgttaggttttttttattatttggtagaaaatgaaaggattaaaagaaattttggttaggcgcggtggtttgtttgtaattttagtattttgggaggttgaggcgggtagattgtttgaggttaggagttcgagattagtttggttaatatcgtgaaattttgtttttattaaaaatataaaaaattagttgggtatggtgatgtatatttgtagttttaattatttaggaggttgaggtaggagaatcgtttgaatttgggaggcggaggttgtagtgagtagagttaagatcgtgttattgtattttagtttgggtaatataaaaagatttcgttttaaaaagaaaaaaaaaaagaaaagaaaagaaaaaagaagaaattttgagagattattttatttgttttttttattttaattacgtaagttgtttaagataggaaaatgtaaatgattttagatttttttggaagcgttttgttatttgtaattattgtttaggggttaaaattatttattgttatgaaattagttttatttaaaatttttagattattataagaaaatattatttgtaaaatgattttgtgttatttttttagttgtgtttataagttataaattagttttttggtgttttttgttttttatttttgagataggtttttattttgttatttaggttggagtgtagtggcgcgattatagtttattgtagttttatgtaatttttgggtttaagtgatttttttattttaattttttaagtagttgggattataggtgtgtattattatatttagttaatttttaaagttttttagagatagggtttttttatgttgtttaggtttaaaaaattatttattaaaaataaatgtaataattatttttatattttttttttgttatattaaatataggttatggtatataaaaattgttttttttgagtttaaaatatttttagttgttgaattgttagtggattattatatattttattttttgaggataaaataaaatatattatttaaaataaattatttaaaataaattatttaaaagaaaatatattattttattttatttaaataaaataataaaataaaataaaatatattagtatttaaaataaaatatattatttagcgagtataatatggaaataatttatttataagaattatatttaatatatttataaaacgttattgtgagatttttaattttattatgttgtaagtttattaaaagtgttataatttatttaatagtagttttttaaattgaataagaaaataagttaatttaaaatgatttgaagagtgaagaaaaaaatttttaagatgtttttgagagttttgggtgattagtagtagttcgtttgaagagttagaaaaagtttaagttttatttttaggagttggaggtaggaggaataatttaggaataatttaaggtggaggagaataaggaaaaacgtttaggagattgatatttttttatattattgttggatgagatgggttaggaagattcgggggtagtaatgtggtcgtgtttatatattttttttagataagagggataagaataaggtcggttttttaagaagagtttttgttttagtttttttttgttgttttattaaaatattttgtaaatattagatatttattttttatagttttggaggttgggaagtttaaggttgggaagttcgagatttgtaggtgtagatttagtgtttgatgagggtatttttttgcggtgtttttatttggtgggaaaggtagaagggataaatgttgtgtttttatttgatagaatagatgttttatgggttgaatgtgtttttttaaaatttatatgttgaaattttattattaatgtgatagtattaagaggtagagttttaagaagtgtttaagttatgagggtagaatcgttatgggtgggatttgggtttttgagggagtgcgtttatttttttttattttttttatcgttacgtgaaagatatagtatattttttttttggatgtagtaataaggtgttattttggaagtagagagtagtttatattaggtattaaatatgtggatgttttatttttggattttttagtttttagaattgtgagtaatatatttttgtttttaataaattgtttaattataggtatttatagtagtataaatggattatgatagaaattgatattgagaatgggatgttgttataattaatatttaaatatgtggaaatagttttgaaattgagtaatgggtagaggttggaagaatttggagatgtatgttggaaaaagtttgtatagatataaatagagttttaagggaaattaagggtgagggtttagaagataaggagagttgtagggagagtttaaattattttagagattaattaagtggtttggttttgattagaatgcggttagaagtatagatggtaaagatatttttgatgagattttaaaaggaaattggaggaaaggttatttttgttatatagtggtaatgaatttggttgaattgtgtttatgttttagtgttttttgaatggtagaatttaaaggtaataaattaggatatttgatggaagaaatttttgagtaaagcgttgagagtgtagtatggttttttttgattgtttgtagtaaaatgtgagtagagagaatgaattaaaaacgaagtttataattaagagggaagtagagtttaaagttttggaaaatttttagtttggttatttaaagaatgaaaaggtatgtttgggagggaatattaagagtgttgttaggtttatatttgataatgagatgagtatgtgtagaaggaagttagatgttatttattaagataatggaagaatgaatttaaaggtatttttgaggttattggttttggatttttatttttgttttagagtgttaggattttgagggtagaatagttttaagggaggatttaggatattatggaattttggggtttgttgtttagggttgttttaagtttttgtttttttattttttatattttggtgtagtattttttggttattattttacgtgtggtttatgtaggtttttgttaggttattttttttgtaagttttggtagagtttacgtgatgttaattttgtaggtgtatagagtgtatgaattgtggagatatagttatttttatttagattttgaaggatgtgttggggattttgggggtttagtttgagaattgttattgaggtgaggttgttgtagaaaatttttattagggtaatgtttagtggagtagtgggattggggttattgtagagagttttaaatagagtaatatttagtggagttgtgggaatagggttgtttttgagaatttagaattgtttagttattagtatgtaagtttattttgggagagtttagattttaatttgtgagagttgttgtatgggttgtatttggtaaatttatgggagtggattttttggatattaggggatttagtttttatttttttgtgttcggaatgggggatatagtattaaagaagattattttgaagttttaagatttaatgttgtttgttttgttgggtttggatttatttgggattagatatttttttttttttgtttgtttttttttttgggaatgggaatgtacgttttatgtttgttttattattgtattttgaaggtttgtaatttatttgattttacgggtttatagttggaggggaattttatttaggatgaattgtattttgaattttatgtttttttaatttagaagatatttaggtgagattttggatttatattttaaagttgatattggaattttggaggttattgggatataatgtatgtattttgtatgtgagaggggtatgaatttggagggtaggggtagaatgttatgttttgaatgtttgtgttttttgtaaaatttatgttgaaataatttttaatgtaatattaataggtggtgtttttaggaggtgattggattatgagggtattttttttatgaatgggattggttttttatacgagagattttatatgagatttggttttttttgtttttttattttttattattgaggacgtagtagtaagttgttattttggaaatagagagtaggtgtttggaattggttttgttttatttgattttgggggtttttttttttttttgtgtaagatttttaaatttgttttttttttttaaagaaagtttttaatatagatgggatttaaagggagttatttgttttttaagaggtgttataatatgtcgttttagttatttatattttagtaagaaaaagttttttaggtttttgttagagattcggggaaaggttttgaattgagaaagaagtcgcgtttttgaggagggcgttgttcggaagttacgtttatttttgtttgtatttaggcgatttcgggagttcggatttttacgtagttatcgggaagggtcgtcgtttcgttcgcggttgttggttcgggtgacgttttcgtttgttataagagtagcggttttcggtgttttttttttgatttcgtatttagttcggagttcggagcgtgtttcggcggtttgtcgggtaaggtcgggtttcggagcggtggcgcgggggcgggcgcggggagaggttaggttttttcgtttagtttttagttcggtattttttattttttaggtttaggttttttagattcgtagttttttgcgttcgtttttttcgttagtttcgcgtttttatttttttcgggcgtttcgacggagatagacgatttttgatttttcgttttcgtttgggtataggtcgggttagttcgcgagggagggagggagggaggacgatagatgtaggcggaaggtaagattgaaatttgagattagaatgttgttttttttttttgaatttttttttttttagagttgtttgtgacggtttttaggtagtttaggttaggtcgcggtttttatttgtagttgtagggagagagaggaggaatttcgtgcgattttagagacgattttataaataaggagaaattagtttttgtgtttatatgtcgagtagttagtacggtttttttttgtttgttttcgggggaaattagggttttgagagtggagatcgagatgggttagtgggtggcggatgggacgttgtacggttagattttggattgtggtgggtttttaaattggtatattttatatcggttttgagattgtgggtattggattttatattttttgaattttaaaaataaggaagaattatattattataataattatagtgatatttttgttggagttttaatgtatagtaggtagttgagtttttgatagaaggtttttagtttaggtgaaggtaggtaatggatttattgtttaatgaattagagatttgaattaaaggtttagaagtacgtgcgtttttatatataggttgggaagatttagggttgggtgggtttttttattttattaaagttggggtagttggggtttgttttattttcgttttatttttagatttatttgtttgtaaggttagagttttttagggtattttgggtgttttaaaattttttataattgttgagtttttggttagaatggttttatatttgtgggtttgggaaagtgtttttgttttgttggaataaaaaagcggggagaaagtataagatttaggatgttttagggcggttggtagaaattgaggaagtttttggagaaatagtgttgtttaatttgttggcgtgggtagtgggtattatgaggattttgttttgtgttgtagtttttattatggagtagttgagtttagtaaatattcgtttcgttttggatttgtttttggcgttgagtgagaataattcggttggaaa

SEQ ID NO: 2278 - DNA, 6000 bp, Artificial Sequence
  chemically treated genomic DNA (Homo sapiens)
tttttagtcggattgtttttatttaacgttaggaataggtttaaggcgaagcgggtgtttgttgagtttagttgttttatggtgaaaattgtaatatagaatagggtttttatggtgtttattgtttacgttagtagattaggtagtattatttttttagaagtttttttaatttttgttaatcgttttgaggtattttggattttgtatttttttttcgtttttttattttagtagggtaagaatatttttttaggtttataaatgtgggattattttggttaaggatttagtagttataggggattttagggtatttagggtgttttaaagggttttgattttgtagataggtgagtttgggggtggggcgggggtaaggtaggttttagttattttagttttagtggggtgggagggtttatttagttttgggtttttttaatttatgtgtgggagcgtacgtgtttttgagtttttgatttaagtttttgatttattgggtaatgaatttattgtttatttttatttgaattaagagttttttattagagatttagttatttattatgtattaaaattttagtaaaggtattattgtaattattataataatataatttttttttatttttgaggtttaaaaggtatgaggtttagtgtttatagttttagagtcggtgtaggatgtgttagtttggaaatttattatagtttagggtttggtcgtgtagcgttttattcgttatttattagtttatttcgatttttatttttagagttttgatttttttcgaggataggtaaagaagaatcgtgttggttgttcggtatgtaagtataaaagttgatttttttttgtttgtgaaatcgtttttagaatcgtacggggttttttttttttttttttgtagttgtagataggagtcgcggtttggtttgggttgtttggaaatcgttataaatagttttgggaggaagggaatttagggagaagggataatattttgattttaggttttagttttgtttttcgtttgtatttgtcgttttttttttttttttttttcgcgggttggttcggtttgtatttaggcgggggcgggggattagaggtcgtttgttttcgtcggggcgttcggaagggatgggggcgcgaagttggcggggagggcgagcgtagggagttgcgggtttgaggggtttgagtttggggggtggggggtgtcgggttggaagttgagcgagggagtttggttttttttcgcgttcgttttcgcgttatcgtttcgaggttcggttttattcgataggtcgtcgaggtacgtttcgggtttcgagttgggtgcgaggttaggaaggaggtatcgagggtcgttgtttttatagtaggcggaagcgttattcgggttagtagtcgcgggcggggcggcggtttttttcggtgattgcgtaggagttcgagttttcgaggtcgtttaagtgtaagtagaagtgagcgtggttttcgggtagcgttttttttaggggcgcggttttttttttagtttaaagttttttttcgaatttttggtaaggatttgaaaagtttttttttattaaggtgtgaatgattgagacgatatattgtgatattttttagagggtaaatgattttttttgagttttatttatattgggagttttttttgagagaaggaagtaaatttggggattttgtatagggaaaaagaggggtttttagaattagatgaaatagaattagttttaaatatttgttttttgtttttaagatgatagtttgttgttgcgtttttaatggtggaaagtggaagggtaaaaggggttaaattttatgtgaagtttttcgtataaggggttaattttatttatgaggaaggtgtttttataatttagttattttttaaaggtattatttgttagtattgtattgaggattgttttagtatgaattttgtagggaatatagatatttaaagtatagtattttgtttttgttttttaaatttatattttttttatatgtaaaatgtatgtattgtattttagtggtttttaaagttttagtattaattttaaaatgtaagtttaaagttttatttaaatattttttaaattagaaaggtataagatttaaagtataatttattttaagtgaaatttttttttagttatgagttcgtgaaattaaataggttataggtttttaaaatatagtgatgagataggtataggacgtatatttttatttttaaagggagaagtaggtaagaagaaaggagtatttggttttaagtaagtttaaatttaataaggtaaatagtattaaattttggggttttagaataattttttttgatgttgtgttttttatttcgagtataggggggtggagattgggttttttagtgtttaggggatttatttttatggatttgttaggtgtaatttatgtagtagtttttataggttgaggtttaggtttttttaggatagatttgtatgttggtggttggatagttttgggtttttagggatagttttgtttttatagttttattagatattattttatttggggttttttgtagtggttttaattttattgttttattaaatattgttttagtgagggttttttgtagtagttttattttagtgataatttttagattgggtttttagggtttttaatatattttttaaaatttaggtggaggtggttgtgtttttatagtttatgtattttgtgtatttgtagagttagtattacgtggattttgttaaggtttataggaagggtggtttgataagggtttgtataagttatacgtgggatggtggttaaagagtgttgtattagaatgtggggggtgggggggtagagatttgaggtagttttaggtagtaagttttaaggttttatggtgttttgagtttttttttaaaattattttgtttttagggttttggtattttgggatagggatgagaatttagaattagtaattttagaaatgtttttgggtttatttttttattgttttgataaatagtatttggtttttttttatatatatttattttattattaaatgtgaatttggtagtatttttggtgtttttttttaaatatgtttttttattttttaaatggttaggttgagaattttttaaaattttaagttttgttttttttttgattataaatttcgtttttaatttattttttttgtttatattttattataagtagttaagagaagttatgttgtatttttaacgttttgtttagagattttttttattaaatattttagtttattgtttttaagttttgttatttagaaaatattaggatatagatataatttagttaagtttattgttattgtgtaataaggatgattttttttttagtttttttttaagattttattaaaagtgtttttattatttatatttttaatcgtattttgattaagattagattatttaattaatttttaagatgatttaggttttttttatagttttttttgttttttgagtttttatttttaattttttttaaagttttgtttatgtttatataggttttttttagtatgtatttttaaatttttttagtttttatttattatttagttttaaagttgtttttatatatttaggtattagttatagtaatattttatttttagtattaatttttgttatagtttatttgtgttgttataaatatttgtgattgggtaatttattaaaaatagaaatgtattgtttatagttttggaggttgggaagtttaagaataaggtatttatatatttggtgtttggtgtgggttgttttttgtttttaaaatggtattttgttgttgtatttaagggggaaatatattgtattttttacgtggcggtgggagggatggaaagggatgaacgtatttttttaagggtttaaattttatttatgacggttttgtttttatgatttaagtattttttaaggttttattttttaatattattatattggtgataaagttttaatatatgaattttggggagatatatttagtttataaaatatttgttttgttaggtgaggatatagtatttgttttttttgttttttttattaaatgagaatatcgtaagaaaatgtttttattagatattgagtttgtatttgtagatttcgaattttttagttttggattttttagtttttagaattgtaagaaataggtgtttagtgtttataagatgttttgataaagtagtaggaaaagattaagataggggttttttttgagaagtcggttttgtttttattttttttgtttaggagaaatgtgtggatacggttatattattgttttcgagtttttttagtttattttatttaataataatatggagaagtgttagttttttaagcgtttttttttatttttttttattttgaattatttttgaattattttttttgtttttagtttttgaaagtagaatttagattttttttggttttttaaacgagttgttattgattatttagaatttttagaagtattttgagaatttttttttttattttttaagttattttgaattagtttgtttttttgtttagtttaagaaattgttattaagtgaattgtgatatttttaataaatttgtagtatggtgaaattaaaagttttataatagcgttttgtaaatatgttaaatataatttttgtgggtaaattatttttatgttgtgttcgttgggtaatatattttattttaggtattaatatattttattttattttattattttatttaggtaaaataaaataatatatttttttttaggtaatttattttaggtgatttattttaggtaatatattttattttatttttaaaagataaaatgtatagtaatttattagtagtttagtaattggaaatattttaaatttaaaaaaagtaatttttgtgtgttatagtttgtatttagtatagtaaaggagaaatatgaaaataattattatatttgtttttaataaataattttttgagtttgggtaatatagggagattttatttttaaaaaattttaaaaattagttgggtgtggtggtatatatttgtggttttagttatttgggaggttgaggtgagaggattatttgaatttaggagttgtatgaggttgtagtgagttatgatcgcgttattgtattttaatttgagtgataaagtgagaatttgttttaaaaataaaaaataaaaaatattaaaaaattaatttgtaatttataaatataattagaaaaataatataaaattattttatagataatgtttttttataatagtttgagaattttgggtgagattaattttatgatagtgaataattttggtttttggatagtggttgtagataataagacgtttttaggaaagtttaaaattatttatatttttttattttaggtagtttacgtgattgaaatgagagaaatagataaaataattttttagggtttttttttttttttttttttttttttttttttttttttttgagacggagtttttttgtgttatttagattggagtgtagtggtacgattttgattttgtttattgtaattttcgttttttaggtttaagcgatttttttgttttagttttttgagtagttaggattataggtgtgtattattatgtttagttaattttttgtatttttagtagagatagggttttacgatgttggttaagttggtttcgaatttttgattttaagtaatttgttcgttttagttttttaaagtgttgggattataagtaagttatcgcgtttggttagggttttttttagtttttttattttttgttaaataatggaagaaatttagtattaaaattttagttgtgtaatatagttttattttttagagggtagaattt

SEQ ID NO: 2279 - DNA, 910 bp, Artificial Sequence
  chemically treated genomic DNA (Homo sapiens)
tttaaggtttttaattgatttggatgaggtttattcgtattattgagggtaatttgttttatttaggttgagatatgagaatggtatgaattcgggaggcggacgttgtagtgagttgaaatcgcgttattgtattttagtttgggcgatagggcgagatttcgttttaaaaaaaaaaaaaaaaaaagaaaaaaattttttttgagacgaattttcggtttgtcgtttaggttgtagtgtagtggtgtaattttagtttagtgtagtttttattttttgggtttaagagatttttttattttagttttttaagtagtttagattataggcgtgtgttattatgtttggttatttttttttgtatttttcgtagagatggggttttattatgttggttaggttggtttcgaatttttgattttaagtgatttatttattttagttttttaaagtgttggaattataggcgtgagttatcgtgtttagttaaattttttttaattaaaaaaaagaatttttttttatttatggatttaggttatatttttttttttttttttttatatatatatttattgtttatatggttttattaaaatttaagttttagaaggatgaggtttttaattcgcgtattatataggtgtttaatatatagtatttttttttagttgtagagaaatgaatagtggaggattttcgtcgttgggtcgtacgagttaatagatcggcggtcgttggtttttcgtttttttagttatttatattacggcgtttagaggcgggatattttgtgtggataatagggagttttcggattgagtcggaagtttttttagagcggatgtcgcggcgggtttgtgggagcggggttattttttttttgttgttgtagttgttatgggtaaaa

SEQ ID NO: 2280 - DNA, 910 bp, Artificial Sequence
  chemically treated genomic DNA (Homo sapiens)
ttttgtttatggtagttatagtagtagagagaagatgatttcgtttttataggttcgtcgcggtattcgttttggggggattttcggtttaattcggaagttttttgttgtttatataggatgtttcgtttttaggcgtcgtgatgtgggtggttggaagagcggagagttagcgatcgtcgatttgttagttcgtgcgatttagcggcgggggttttttattgtttatttttttataattgaaggaaaatattgtgtgttgagtatttgtgtagtgcgcgaattaaaggttttatttttttggaatttaaattttaatgaagttatgtgggtaataaatgtgtgtgtgagagagagagagagagaatgtgatttgagtttatgggtaaggaagaatttttttttttaattaaaaaaaatttggttgagtacggtggtttacgtttgtaattttagtattttgggaggttgaggtgggtggattatttgaggttaggagttcgaggttagtttggttaatatggtgaaattttatttttgcgaaaaatataaaaaaaagtagttaggtatggtggtatacgtttgtagtttaagttatttgggaggttgagatgggagaattttttgaatttagaaggtaaaggttgtattgagttgagattgtattattgtattatagtttgggcgataggtcgagagttcgttttaaaaaaaatttttttttttttttttttttttttttgagacggagtttcgttttgtcgtttaggttggaatgtagtggcgcgattttagtttattgtaacgttcgtttttcgggtttatgttatttttatgttttagtttaaataaagtagattatttttaataatgcgggtgggttttatttaaattagttgaaggttttaag

SEQ ID NO: 2281 - DNA, 754 bp, Artificial Sequence
  chemically treated genomic DNA (Homo sapiens)
ttggttcgtttttttgttatcgtagattggtcgttagtttttttcgagcgttttgttttcgagggtcggcgtattataaaagaagtcgttttagttacgttttttcgtagttcggcggtttcgcgggtttgttttttgttttaatagtgtttgacgaatagattcggggatttttttttagttttcgatcgtttttcgatttttttttcgtttgtaattttcgggattattttttcggttattttttgtttttgggatttgttagtatcgtttttgtggttagtttttttttgttaattaattatgagtttttagattcgttagaattattttatcgacgtggaggtagtcgttaatagtttggttaatttgtatttgtaggttttttatatttatttttttttggtgagtttttaggacgtttttggttttaattttttttagttgcgtattttcggtttttattgtacgcgttagttttttttgtgcggtcgggtaaataagagggcggagttttttggtttcgtttttcgttaattattgttgtttttattttttatcgtagggtttttatttcgatcgcgatgatgtggttttggaaggcgtgagttatttttttcgcgaattggtcgaggagaagcgcgagggttacgagcgttttttgaagatgtaaaattagcgtggcggtcgcgtttttttttaggatattaaggtaattagtgtgtgggtaatggattatattttttagtaggtt

SEQ ID NO: 2282 - DNA, 754 bp, Artificial Sequence
  chemically treated genomic DNA (Homo sapiens)
ggtttgttgggagatgtagtttattatttatatattagttattttgatgttttggaagagagcgcggtcgttacgttggttttgtatttttaggagacgttcgtagttttcgcgttttttttcggttagttcgcggaagaagtggtttacgttttttagagttatattatcgcggtcgaaatagaagttttacggtaagagatggaggtaataatggttagcgggaggcgaggttaagggatttcgtttttttgtttattcgatcgtataaagaaggttggcgcgtgtagtgagggtcggaggtgcgtagttggaggaaattagggttaggggcgttttggggatttattagagagaggtaggtgtaggaggtttgtaggtataaattgattaggttgttgacggttgtttttacgtcggtggaataattttgacgaatttgggagtttatggttggttggtaagaaggagttaattataaaaacggtgttggtaggttttagaagtaggagatggtcgagaagatggtttcggaggttgtaagcggagaggaaatcggagggcggtcggaggttggaagagagttttcggatttgttcgttaaatattgttgaagtaagagatagattcgcgggatcgtcgaattgcgaggggacgtggttagggcggttttttttatggtgcgtcggttttcggaggtagggcgttcggggagggttagcggttaatttgcggtggtaaggaggcgggttag

SEQ ID NO: 2283 - DNA, 536 bp, Artificial Sequence
  chemically treated genomic DNA (Homo sapiens)
atttttttttgtttttagttatttttatttataattttcgttgattatattttttcggtgttcgttataggtaattagagaataatagatttttttttagagttttcgttttaggatttttttgattgttaacgaaagatgttaattataggtagttttagttagattattgagcgtttagtaaaaaaaataaaattaggttgagggtagaaatgaaattaatatagtaatttttaatgtatgaaggaaatttcgtttatatatgttcgtaggattttttgcgtggaaatagtagtttgtttttgattattcggaggatatggagtattttaaataggaattttagagggattgaaatttgttgtttgttttattaggaatattgtttgtaaggtataaggtgttttttggtagtgagcgcgttttgcgtatgcgcggtttattcgggaattattgtttagtagtcgattaagttgtattttttgaattttcgtagaaaagataatttttttaattagagttagtaatgtggatag

SEQ ID NO: 2284 - DNA, 536 bp, Artificial Sequence
  chemically treated genomic DNA (Homo sapiens)
ttgtttatattattaattttgattaaaagaattgttttttttgcgaagatttaaggaatgtaatttagtcggttgttgggtagtaattttcgaatggatcgcgtatgcgtagagcgcgtttattattaaaagatattttgtgttttgtaaataatatttttagtggaataggtaatagattttaatttttttaaagtttttatttggggtgttttatgtttttcgggtagttagagataagttgttgtttttacgtaggggattttacgagtatgtgtaaacggagttttttttatgtattggaggttgttatgttgattttatttttgtttttaatttgattttgttttttttattgggcgtttagtgatttggttaaggttgtttgtgattggtatttttcgttgatagttagggaggttttagaacggggattttggaggagggtttgttgttttttggttgtttgtggcgggtatcgggaggatgtgattagcgggggttgtgggtgggggtgattgggagtagggaagagt

SEQ ID NO: 2285 - DNA, 2378 bp, Artificial Sequence
  chemically treated genomic DNA (Homo sapiens)
tttttagagttaatatgataggtatcgaatggtttttgtttttttggtagagttgggggtagagttaggtttggttacgttgggttttaaggggttgttattttgtttagggagtttttggttgggtggttttttttttagggtgagtacgcgttttttttatttttatttcgaggcgtttaggtagggaatagtttattggttagtgttttttttttttgttttcgtttgtatttttattatttattttgttttagttgttttttgttttttttttcgttttttgtttagagttttaggttttttttgtatttttgagtttgtttatttagtagtgtttttcgtttagggtttttttgggttgggggtgtatatagcggggagaggcggtttttgttgttttttatttagttcggtttagtggtcggagtcgtttaggatagtggtagtagatggggttgtttgattaggattagggaagataaggttttttgcgtgattttagagttggggacgttaaaattgttttttttttttyattcgtttgtcgttgtttttgttagggagaggtttttattttgtgggtttttcgttttagtattaagtttgtatggttgtttatttggtttaggaattggggattagcgatatacgggttttgttttttatcggtttttatatgagtttagggtttaagggttgaggttgggagttttttagtagtttgtgacgtaggtgtttgtttttgttatttagttgttatattgtttggggtattttaggtttcgttagcggggtagttttgggtggagttggttttacgcgggtttatttagtcgttatttggaggaggttaaaatttaggttgtttcgtggtagttagtagtttaggtttgttcggaaattttttgttttagttgtagttttcgtttatttttttgtttttttttttggtttttttttggtattgttttttagttggttggttttttatttgtttagttatttatttatattttttattttatttgagggtgttttaaagaagagttcgtaatagttcgggggtttatagttagttattcgcgggatttcgtatatgtacgtggatttataggaagattttttttgttttttttatagaatttagttggtgtagaaattgggttttgtagtaacgaaaggtcgatttgtgtagttgttgttatttcgaatttttagtttagatgttggttgtggtatggggattaggggttgtgatttttatagttttggtaggtattacgggggatgttttttttattttgtgtttttattttaggttagttttttttttaagtcgacgttcgtagtgttaattttaaaggattgtgtagttagtttgtggcgttttatgggatttaggaagtttaatcgagttttgtacggtatttacgaggtatttaggtatttcggtgttgggtagggggtatatatgtgatatagatttttgagtgtgggttttatatatttggtttggtatagttgtaagttagtttagttattttgttcgttgtggtattggggttaagtgatggaaggtttaggtatcgttatttttacgtttggtatattggtttaggttagtttggtaagttagtttttttaggggttaagaataggtgaggaggatggtgaggaagtacgtcggggggttgttaattgagggaggaggttattatttggggaggttggtcgttttaagagtattgggttatttgtaggaaggtggttgttattagtaatgagacgaggggttttgcgatttttagagttgttagttagttagttttgggtggtaagagtgattttttttggggtttttttttttttatcgttttttttttttttttttttttttttgagacggagtttcgttttgtatagttgattgtaatgttgatttcgtttattgtaaggtttgtttcgggtttacgttatttttattgttataagttttcgagtagttggattatagacgttcgttattacgtttggttaattttttgtatttttagttagagacggggttttattgtgtagcggatggtttcgatttttagattttcgttgatttatttttttcggttttttaagttttgggaaataggcgtgagcgtcgcgttcggtttttagttttttttttatttttaggattttgaggtttagaggggtagttttaggggaggatattttattggttagacgttttaggttttgttgttttgttatttagttgttttcggaggagcgtatatatatattaggattgtattgttttagttgtgtagtttttgttagatgtgggaggtagttagttgtttagaggtatgtttttt

SEQ ID NO: 2286 - DNA, 2378 bp, Artificial Sequence
  chemically treated genomic DNA (Homo sapiens)
ggggggtatgtttttgggtagttagttgttttttatatttggtaggggttgtatagttggggtaatgtagttttggtgtgtgtgtacgttttttcgagggtagttgagtggtagagtagtagagtttggggcgtttggttagtggggtgtttttttttgaagttgtttttttgagttttagggttttagggataaagagggagttgggggtcgggcgcggcgtttacgtttgttttttagaatttgggaggtcgaggggggtggattaacggaggtttggagatcgagattattcgttatatagtgaaatttcgtttttaattaaaaatataaaaaattagttaggcgtggtggcgggcgtttgtagtttagttattcgggagtttgtggtagtgagaatggcgtgaattcggggtagattttgtagtgagcgagattagtattgtagttagttgtgtagagcgagatttcgttttaaaaaaaaaaaaaaaaaaaaagagggcgataggagggaggagattttaggaggagttatttttgttatttagggttggttggttggtagttttgagggtcgtagagtttttcgttttattgttggtggtagttatttttttgtaggtgatttaatgtttttggggcgattagtttttttagatggtgatttttttttttagttgatagtttttcggcgtgtttttttattattttttttatttatttttagtttttgggaaagttggtttgttaggttgatttgagttaatgtgttaagcgtgagggtggcgatgtttggattttttattatttggttttagtgttatagcgagtaaagtggttgggttggtttgtagttgtgttaggttaagtgtgtggggtttatatttaggggtttgtgttatatgtgtgttttttgtttagtatcggggtgtttaggtgtttcgtgggtgtcgtgtaaggttcggttgggttttttggattttatgggacgttataggttggttgtatagttttttgaggttagtattgcgggcgtcgatttggaggaggagttggtttagggtgggggtatagggtggggaggatatttttcgtggtgtttgttagggttgtgggagttatagtttttggtttttatgttatagttagtatttgagttgggagttcggggtggtaatagttatataaatcggtttttcgttgttatagagtttagtttttgtattaattgaattttgtgggagaagtagggagggtttttttgtgggtttacgtgtatgtgcggggtttcgcgagtggttggttatgagttttcgggttgttacgggtttttttttggggtatttttaaatggaataagaggtgtggatggatggttgggtagatggagggttagttagttggaaggtagtgttagggggaagttagggagaggggtaaggagatgggcgaaggttgtagttggagtagagggttttcgggtaggtttggattgttggttgttacgggatagtttggattttagttttttttaggtagcggttgggtgagttcgcgtggggttagttttatttagggttgtttcgttaacggggtttgagatgttttaagtagtgtgatagttgaatgatagggataggtatttgcgttatagattgttaaagagtttttaattttagtttttggattttgggtttatgtaggggtcgatgggaggtaggattcgtgtgtcgttgatttttagtttttgagttaggtgagtagttatgtaggtttggtgttggggcgaaggatttatagagtaggggtttttttttggtagagatagcggtaggcgggtrggggaagaggggtagttttggcgtttttagttttggggttacgtaaggggttttattttttttgattttgattaaatagttttatttattgttattgttttgggcggtttcggttattgagtcgggttgggtgaggagtagtaggagtcgttttttttcgttgtgtgtatttttaatttagaggggttttggacgaggggtattgttaggtgggtaggtttaggggtgtaggggagatttggggttttgggtaggggacggggagagggataaggggtagttggagtagggtggatggtggagatgtaggcggggataaggaggaaggatattggttaatgagttgttttttgtttgggcgtttcgaagtgggggtgggggggacgcgtgtttattttggggggaggattatttagttaggagttttttgggtaaaatgatagttttttagagtttagcgtggttaagtttggttttgtttttaattttgttagagaaataggagttattcgatgtttgttatgttgattttagagg

SEQ ID NO: 2287 - DNA, 3504 bp, Artificial Sequence
  chemically treated genomic DNA (Homo sapiens)
  unsure 3306, 3372: n is a or g or c or t
gcggttacggttttaatacgatttattatagggcgtcgattcgatttttgttttttgtaattttcgttttttgggtttaagcgatttttttgttttagtttttcgaggtagttgggattataggtgttaatagtttattaaatagtatgttatttatttaaatttttgtttttagggagtttatttttttttttgttttaaggagtttgagtgagaggttttggtaatagtaaggggaaagaaggaaattgtattttcgagtttatattttgttttagtattatagtaaatttagaggtttttggatttttagatgttaagaggagggataggttttgagttttttaaatatttttatatgtttattgtttttagttgggtttttttagaagtagattttgagataaggatttaaggataaattatttatttattttttatttattttattttttgagacggagttttatttttgttgtttaggttggagtgtaatggtatgattttggtttattgtaatttttattttttaggtttaagcgatttttttgttttagtttttcgagtagttgggattataggtatggattattacgttcggttaattttgtatttttagtagagatggggtttttttatgttggttaggttggtttcgaatttttaattttaggtgattcgtttattttggttttttaaagtgttgagattatagacggtgagttattatgtttagttaaattgtttatgtgaggtgtgatttcggaagtattggtattttattgtgggaaagtgggataagtgaggaaatgaagttaatatagggtgtattattgagtaggtaattgttgtgggaagttgggttttatcgtataggggatttttgggagattgtggtatatatttttggatggggtatttatttatttatttttgtttatttatggttgatagttgtttttaggggtatttattttgtattggttgaatgtaaaaatgttttttaagttagagaaagttttttggtagagaaaatatggttttataagtattgggggtatttgtttattataatagtgtttatataattataaatgattttaataattatttaatgttttttttttgtattagaatataatttttttgaagatagggatagtattattaattgtatttttaggatttagaatggtgtttggtatatggtaggttttcgatagatatttgttgaattaatgtaatttggaggttgataaatttatgataaagattttagttttgtttgaatagtttttttattttttttttttttttttttttattttaaatttgatatagtagtgtttaaaatttatttttagtattttttttaaaatttgtttttttttagagtataaaagtttagtatttaattttgtttatggttgtttggaatagagggtgttttttttatttttttttgtagttagtagtgtttatgtgattaagttttgagtaagaggtgtggaattgatggttgttatttttaagatgtgtttttatgggtggaggtgtatttattttttttttattttttttttttgttggttggaatttggatatcgtggttggagtagttattttggattatgaggtggaaattttggattaaaggatggtggaagttagaagatttaggtattttgatgattagggagtagttattttaattttgggttgaatttttggttttgttttatatgagagagtttttggttatgttattgttgtttggggtgggattttttgttatttttaggtgaataatttaattttaagtgatatttagaaggtttttgttagattgattttttgggaggggagggaataaacgagttttaggtggtggaattagagtttgttggagaggagagttttttttggtgatggaagttaggggttttttttattggttgtttttttttttgggtttaggtaggtttagttttttttaggattttgagaagtttagttttttttttaggagtagttatttttataaattttttgtttttttagtcgatatgttttacggtaggttcgaggttggttttgttataatttattttttttaagagtggtattaaggttttttggtgggggattttttttttttatttttattttttaagagtattagggaagatatagttagtgtttttttagtattttttttttatttgttgggtgtaagaagggaatttgagggttttgtagtgtttaggggtgggagtggaaatagataggaaagatttagagtttttaagaagcgaagtagggagagagataaagaaggtaggaataattatggatatatattattatatatatataggttataagagtaggaggttggagttgtaagaggtggtagggaagtttttagaaaggtagattttagttttatttttttttgttttgtaatgttgaagtttttaggtagaggggaatttttagatttttgcgattgttagagttttgtggatttatttgttagtttttttatttttaattttgattattttgggtttgtttttaggatagaatatgggaatgagaagaggatttgggaaggggtaattttgggaaaaaaaagtttttattagttatttttggttttgaggatattttttaggagtggtttgttaagtcgtgtgattttggataagtttcgtttattttttaggttttagttttttttgagggattttgaatgggcgggggttgttgtagttttttttagttgggagattcgggaggaggttcggggtgttagggtgggaggagggtttggtttgtcgttgaaagtcggttagcgattgtcggcgtttagagttggtggcgttttttgcgttttttgatttttagcgcgttcgttcggagagtagtgttcgttattttttggttcgggatcggtagaggggtgcggcggggcgggtttaggggtttttggcggtcggaagaatcgggattttgttaggtttttttcgcgggtagggcggtttttcgtcggttttttttttatcgttcgttattagttcgggattagttttcgtacgcggtttcgtaggtggtagcgatggtttagttttgaatttttcgttatggtcggcgttttcggttcgttgcgttttgtcgtgttgttgttcgggatggtgggtagggtcggttttcgtttttaggtgagatttagggatttcgacgatatcgggggaggcgggtggttattgcgggttgtagggcgtagtgttttggtggagggtntcgggatttgaacgaaatttcgagacgttggcgggggtattcgaaagtttcggggggagtagggantggagatttggtgttttgggttggaaggtttaggtgagggtttggattatagaggattttttttaattttacggaggcgttttttttttcgttattcgggtttttttgttcgggtatcgttgtcgtcggtcg

SEQ ID NO: 2288 - DNA, 3504 bp, Artificial Sequence
  chemically treated genomic DNA (Homo sapiens)
  unsure 133, 199: n is a or g or c or t
cggtcggcggtagcggtgttcgggtagagggattcgggtggcgaggaagagggcgttttcgtggggttggggggaattttttgtagtttaagtttttatttgggttttttagtttagggtattaagtttttantttttatttttttcgaggttttcggatgttttcgttagcgtttcggagtttcgtttaagtttcggngttttttattaggatattgcgttttgtagttcgtagtagttattcgtttttttcggtgtcgtcggggtttttggattttatttgggggcgggggtcggttttgtttattatttcgagtagtagtacggtaaggcgtagcgggtcgggggcgtcggttatggcggggagtttaggattgggttatcgttgttatttgcggaatcgcgtgcggagattgatttcgggttggtggcgggcggtgggggaggagtcggcgaggggtcgttttgttcgcgggaggggtttggtagggtttcggttttttcggtcgttagagatttttgggttcgtttcgtcgtatttttttgtcggtttcgggttaggagatagcgggtattgtttttcgagcgagcgcgttgggaattaggaagcgtaggaggcgttattagttttgagcgtcgatagtcgttggtcggtttttagcgataagttaggttttttttttattttggtatttcggattttttttcgggttttttagttgaggaaagttatagtaattttcgtttatttagggttttttaaaggaaattgaggtttgaggaatggacgggatttgtttaaggttatacggtttggtaggttatttttggaaagtatttttagagttaggggtgattaataagaattttttttttttaggattatttttttttaggttttttttttatttttatgttttgttttgaaggtaggtttaggatagttaaggttgggggtggggagattgataaatggatttatagaattttgatagtcgtaagggtttagaggtttttttttatttggaaattttagtattgtagggtagggagggatgaggttggggtttgtttttttggaagtttttttgttattttttgtagttttagttttttgtttttgtaatttgtgtatgtgtgataatgtgtgtttatggttgtttttgttttttttatttttttttttgtttcgttttttggggattttggattttttttgtttgtttttatttttatttttaaatattgtagggtttttaggttttttttttatatttaataagtggaaagagaatgttaagagggtattgattgtattttttttaatgtttttgagaagtggggatgggaaaagaggattttttattaaagaattttgatgttatttttaggaaagatgagttgtggtagagttagtttcggatttgtcgtggggtatgtcgattaaagggataggaagtttgtgaaagtagttatttttggggagagaattgaattttttaaagttttgaggaaggttggatttgtttgagtttagggaaggagatagttagtgggaggggtttttggtttttattattaggagagatttttttttttagtaagttttggttttattatttgagattcgtttattttttttttttttaagaggttagtttagtagggattttttaggtattatttaggattaggttgtttatttgggagtgatagaaaattttattttaaataataatggtataattaagggtttttttatgtaaagtaaggttagaggtttagtttaaggttggagtggttgttttttgattattagggtgtttgggttttttagtttttattattttttggtttaagatttttattttatgatttaaggtggttgttttagttacgatatttaaattttaattagtaggaaggaggaatgggaaggagatgggtgtatttttatttataaagatatattttgaaagtggtagttattaattttatattttttgtttagaatttagttatataggtattgttagttgtaaaggagggtgggaaaagtattttttattttaggtaattatgggtaaggttaaatattgggtttttatattttagaagaaggtaaattttaaaaaagatattggaagtgagttttaggtattgttatattaagtttagggtggagagaggagaaaggaagagatagagaagttatttagatagaattggggtttttattatgaatttgttagtttttagattatattgatttagtaagtatttatcgaaaatttattatgtgttagatattattttaggttttggggatataattggtgatgttgtttttatttttagagagattatattttaatataggagggaaatattaaataattattggagttatttataattgtgtaagtattattatggtaagtaaatgtttttagtatttataaggttatgttttttttgttagggggttttttttgatttggagaatatttttgtatttagttagtgtagggtaggtatttttaagagtagttgttaattatggatggataggagtggatggataaatattttatttagaggtgtgtattatagttttttagaggttttttgtgcgatggagtttagttttttatagtagttatttgtttagtaatgtattttgtgttggttttatttttttatttgttttatttttttatagtagggtattagtgttttcggggttatattttatataaataatttggttgggtatggtggtttatcgtttgtaattttagtattttgggaggttaaggtgggcggattatttgaagttgggagttcgagattagtttgattaatatggagaaattttatttttattaaaaatataaaattagtcgggcgtggtggtttatgtttgtaattttagttattcgggaggttgaggtaggagaatcgtttgaatttgggaggtggaggttgtagtgagttaagattatgttattgtattttagtttgggtaataagagtgaaatttcgttttaaaaaataaaataaatgaaaaataaataaataatttgtttttaaatttttattttaggatttgtttttgggagagtttagttgaagatagtgggtatatgagggtatttaggaagtttagggtttgtttttttttttaatatttgggggtttaaaaatttttgagtttgttgtgatgttaggatagagtatggattcgggaatatagtttttttttttttttttgttgttattagggttttttatttaggttttttagagtagaggaaaggatgagttttttaagagtagagatttgaatggatggtatattgtttggtaaattgttaatatttgtaattttagttatttcgggaggttgagataggagaatcgtttgaatttaggagacggaggttgtagggagtagagatcgagtcgacgttttatagtgagtcgtattagagtcgtggtcgt

SEQ ID NO: 2289 - DNA, 1312 bp, Artificial Sequence
  chemically treated genomic DNA (Homo sapiens)
gttttttgtagtttggttggtgacgtcgagtttttagttcggttttacgcggcggcgttttgtttcgtttttttgtttacgtgttagtttttgtagttcggtcgttgaggtcgttagaggataggttagggtgggtcgttcgttcgagggcgcgcgggcgtaaaggaggggcgttcgtgatttatatgattcggttttcgattagatcgttaagttttatttacgcggcgttcggggggattcggtttttgagcgttttatagaggttagttttcgatttcgatttttttgggttatttttaatttttttgagggattttcgcggcgtatatatttgagagttttcgggtgcggttttcgggtaaattcggtcgttcgtgggttcgtttcgattcgtttcgattcgtttcgatttttttttttttgtttttttcgttcgtttttttttattttttttttcgtttttttttttttttttttttttttttttattggcgcgcgagcgtcgcgtcgagttcgttcgcgtttgcgcgttttcgacgtttcgtcggcgcgcgttgtcgttagcgaggttcggggaggtcgcggcggaggcggaggttcggcgttttgggcggcgttttgttttcgaagttcgtttttttcgttaggtggcgagcgttcgaggggaggggatagtcgggtaagtaggaagttgcggtttaaaagggtaattcgcgcgggattttttttttttagtcgcggggagtttgagaaagcgcgtttgtttcgcgattattacgtatttttttttcgtttgtggttatgtatcgttatttgggcgaagcgttgttgttgtttcgggtcgggttcgttgttttgggttcggcgttcgtcgattcggtcgcgttgttgggttgggttcggggatagttcgtcgtcgtttcgtagtcggggttggtattggtcgttcggcgttattatagcgaggcggtggtcgatcgcgaggacgattttaatttttttaagatggtggagggttttttcgatcgcggcgttagtatcgtggaggataagttggtggaggatttgaggattcgggagagcgaggagtagaagcgaaatcgggtgcgcggtattttgcggattattaagttttgtaattatgtgttgagtttttttttttttattcggcgcgacgacggtttttgggaggttatcgaaggttatcgggtttagtatagttagtatcgtacgttttgtaagggaggtgagcgtaggtcgggtttcgtttcgttttttttgttttttttgcggttttttttttaggttt

SEQ ID NO: 2290 - DNA, 1312 bp, Artificial Sequence
  chemically treated genomic DNA (Homo sapiens)
gggtttgaggggagggtcgtaggggaggtagggagggcgggacggggttcggtttacgtttattttttttgtagggcgtgcggtgttggttgtgttgggttcggtagttttcgatgattttttaggagtcgtcgtcgcgtcggatggggaaggagagatttagtatatggttgtagggtttgatgattcgtaggatgtcgcgtattcggtttcgtttttgtttttcgttttttcgggtttttaggttttttattagtttgttttttacgatgttggcgtcgcgatcgaagaagttttttattattttgaagaagttggggtcgttttcgcggtcggttatcgtttcgttgtagtggcgtcgggcggttaatgttagtttcggttgcggggcggcggcgggttgttttcgggtttagtttagtaacgcggtcgagtcggcggacgtcgagtttagggtagcgggttcggttcgggatagtaatagcgtttcgtttaggtagcggtatatggttataagcggaggggaggtgcgtgatggtcgcgaaataggcgcgtttttttagatttttcgcgattagggaggaagggtttcgcgcgggttgtttttttaagtcgtagttttttgtttgttcggttgtttttttttttcgggcgttcgttatttaacggggaggacggatttcggggatagggcgtcgtttagggcgtcgggttttcgttttcgtcgcggttttttcgggtttcgttggcggtagcgcgcgtcggcggggcgtcgggggcgcgtaggcgcgggcgggttcggcgcgacgttcgcgcgttagtggggaagggaggggaggggagaggaagggcggggaggagagtggaggggaacggacgggaggggtagggaggggaaggtcggggcgggtcggggcgggtcggggcgggtttacgggcggtcggatttgttcggaggtcgtattcgggggtttttaggtatgtgcgtcgcgggggttttttaggggggttgggggtagtttagggaggtcggggtcgggggttggtttttgtagggcgtttagaggtcgagttttttcgagcgtcgcgtgggtgaggtttggcggtttggtcggggatcgggttatgtgagttacgggcgttttttttttgcgttcgcgcgttttcggacgggcggtttattttggtttgttttttggcggttttagcggtcgggttgtaggggttgatacgtgggtaggaaagcgaggtagagcgtcgtcgcgtaaggtcgggttgagggttcggcgttattagttaggttgtagagagt

SEQ ID NO: 2291 - DNA, 1602 bp, Artificial Sequence
  chemically treated genomic DNA (Homo sapiens)
tcgggtttaaagtacgtatgcgtcgattttcgttatttcgttttttttttgaagtttttttagaggcgtgttaggtcgttcgttcgagcgcggcgagacgttgcgtatcgttttcgtgtaatttcgtagtttttttcgaagtgatatattttacgtaattcggttcggcggcgggcggcgcgcgatttacgtagtttagtcgcgggagggtttcggtttttgtggttcgttcgttgttattcgtaggtattggcggcgtttgtagaggggtagagcgagttttcgagtgggtttggagtcgcggacgtgggcggggcgggaaggaggtagcgagaaaagaaattggagaaattcggtggtttttttaacgtcgttttagagagattaggtcggttttcgtcgttgtcgtcgttatttttttttttggggagttgggggcggggggcgaacgcggcgtatcgggcggggcggttatcgaggggacgcggcgtgtaggcgtagtcggggtcggggtggcggggttcgcgcggagggcgtgggggtagggatcgcgggcgtttttgtagttgttaagcgttattaataggttgtatcgtttttcgtcggtcggcgcggttttcgggcggggagcggtcgggggtggagtgggagcgcgtgtgtgcgagtgtgtgcgtcgtgcgtcgtttttatcgttttcgttcggtttcgttcgtttcgttaggtcgggttgttttttgcgtgttcgcgttttttttttttcgtcgtcgttttttttattttgcgagttcgtgtttgtgacgggagttcgagttatcgtattgtcgtcggggacggattttgtgggtggaaggagacgtcgtagtcggagcggtcgaagtagttgggatcgggacggggtacgcgcgttcggaagtttcgattcgcggagttcggcgcggggcggagggttggtttgttagttgggtaatgggagatttttttaaatagggttttttttttatttatggagaaaggggcggttgtttattttttttttttagaaaaaaaaaatatattttttttttgttttttttgcgtttataagttaagttgtttatttggttgcggcgggaattgcggacggtggcgggcgagcggtttttttgttagaggtaagaagcgaggcgggagggggtcggggcgcgttcgttttttcgaggtgtcgttgggatcggagataattcgggggtcgtcgcgggagtttataaatttttattagtttcggggagtgggggtggggggttggtaagggtcgggcgacggtgacgaaagggtagcgggcgggtgatagcgttggttttttttttttttttcgtcggcgtttttggtcgggtcgagggggaggaatttgatttcggacggcgagcgagttttgtcgaattgtcggggtttcgagttttttattttcgcgggaattttggttttttttttttttttagtgtttttttttttttaagggggtcgttcgatattcgttttcgtggtgaacgttaagtcgcgtttgaattttattcgttcgaatattgtgtacgttatttcgcggcgttcgagcgcgagttcggg

SEQ ID NO: 2292 - DNA, 1602 bp, Artificial Sequence
  chemically treated genomic DNA (Homo sapiens)
ttcgggttcgcgttcgggcgtcgcggggtggcgtgtataatattcgggcgagtaaaatttagacgcggtttagcgtttattacgaaaacgggtgtcgggcgatttttttggaggaaaggggatattagggggagaaaagaggttaggattttcgcgagaatgagaggttcgaagtttcggtagttcgatagggttcgttcgtcgttcgaggttaggtttttttttttcggttcggttagggacgtcggcggagggagaggaagaggttagcgttgttattcgttcgttgttttttcgttatcgtcgttcggtttttgttagttttttatttttatttttcgaggttaataaaagtttgtaggttttcgcggcggttttcgagttgttttcggttttagcggtatttcgggggagcgagcgcgtttcggttttttttcgtttcgttttttatttttggtagaggagtcgttcgttcgttatcgttcgtagttttcgtcgtagttagataaataatttagtttgtgaacgtagaaggagtaggagggaaatatattttttttttttaaaaaaaggaagtaaatagtcgtttttttttttatgggtggggggagagttttatttaagaaagttttttattgtttagttgataagttagtttttcgtttcgcgtcgggtttcgcgggtcggggttttcgggcgcgcgtgtttcgtttcggttttagttgtttcggtcgtttcggttgcggcgtttttttttatttatagaattcgttttcgacggtagtgcggtgattcgggttttcgttatagatacgagttcgtaaaatggaggaggcggcggcggagggaagagagcgcggatacgtaaagggtagttcggtttggcggagcgagcgggatcgagcgggagcggtggaggcggcgtacggcgtatatattcgtatatacgcgtttttattttattttcggtcgtttttcgttcgagggtcgcgtcggtcggcggggaacgatgtaatttgttggtgacgtttggtaattgtaggggcgttcgcggtttttgtttttacgtttttcgcgcgggtttcgttatttcggtttcgattgcgtttgtacgtcgcgttttttcggtggtcgtttcgttcggtgcgtcgcgttcgtttttcgtttttaattttttaggaaaaggggtggcggcggtagcggcgggggtcgatttggtttttttggggcggcgttaagagggttatcgagtttttttagttttttttttcgttatttttttttcgtttcgtttacgttcgcggttttagatttattcgggagttcgttttgtttttttgtaagcgtcgttagtgtttgcgggtgatagcgggcgggttataagagtcggggttttttcgcggttgagttgcgtgagtcgcgcgtcgttcgtcgtcgggtcgagttgcgtgaagtgtgttatttcgaaaggggttacggggttgtacggaaacggtgcgtagcgtttcgtcgcgttcgggcgggcggtttgatacgtttttggggaggttttagggaagggacgggatagcgggggtcggcgtatacgtattttgggttcgg

SEQ ID NO: 2293 - DNA, 985 bp, Artificial Sequence
  chemically treated genomic DNA (Homo sapiens)
tataacggttgttatgatgtttattaattgttagagttttagcggaaacggaaacgcgcgaggagcgagatgttttggtttttttaggttagttggttttttaaagatttcgatggttttttataaatatgtaaatattgtgggggcgtggcgggattttatgtttcgtttttttatcgaggttgcgttggaagacgggcgttcggaatttttgggtttatttttaatgttttttggttttttttttttttgtttagttttattatcgtttcgtttaggtcgattgtaaaatttttagttgttttttgagtaattatacgttttttacgttttttttttttttattttatttttttttttttttttattttgaggtttttagttttagattgatagagttgaaggttattcgttttcgtaaagcgtagcggtaagtttcgttttttggaggttttacggtcgaggcggggtcgggatatagcgattttaattcgttttattaatgaggatacgcggaaattttcgttttcgggcgtgggttaatggcgttggttggggggggcggttatcgttttttggcggttgcgaggttttattgtaggggcgttagtgggtttagtgacgttgcggtttttttttgtttaggttttaacgtttcggggtaggggtgcggttttgtaataggaagtcgagcgttttgtaagtttttcgtcgggtattagttattcggtttcgtattttatttggtgtattttttagatattttcggggtttttatttggagattttcggagtttttttttttgcgttagttatgtttttaaatcgtattttgtttatgtttttattgttaggattggaggattgggaggatgaattcgatttggagaacgtagtgtttttcgaagtggtttgggaggtggttaataagggtgagtacgttaggcgtcggggtttttgacgagaaggatagtagtggatgggg

SEQ ID NO: 2294 - DNA, 985 bp, Artificial Sequence
  chemically treated genomic DNA (Homo sapiens)
ttttatttattattgtttttttcgttaagggtttcgacgtttggcgtgtttatttttgttagttattttttaggttatttcgaagagtattgcgttttttaggtcgaatttatttttttagttttttagttttggtagtgaggatatggataaagtgcggtttaaaggtatggttggcgtaggaaggggggtttcggggatttttaggtagggatttcggaggtgtttagggaatgtattaggtagggtgcggggtcgagtagttggtgttcgacgggaagtttgtaagacgttcggttttttattgtaagatcgtatttttgtttcgaagcgttgggatttaggtagaaggaggtcgtagcgttattgagtttattggcgtttttgtagtgaaatttcgtagtcgttaggaggcggtggtcgttttttttagttagcgttattggtttacgttcgggggcggggattttcgcgtgtttttattggtggaacgggttggagtcgttgtgtttcggtttcgtttcggtcgtgagatttttagggggcggagtttgtcgttgcgttttacggaaacgagtggtttttagttttgttaatttggagttggaggttttaaagtggggaggaggaggagggtgggataaagaggaaaggagcgtggaggacgtgtggttatttaaagaatagttaagaattttgtaatcggtttgagcggggcggtggtggggttgagtaaaaggaggaggagttaggagatattgggaatggatttaggagtttcggacgttcgttttttagcgtagtttcggtgggagggcggggtataaagtttcgttacgtttttataatatttatatatttatgaggaattatcgagatttttgaagaattagttagtttagaggagttagaatatttcgtttttcgcgcgttttcgttttcgttaggattttggtagttggtgagtattatggtaatcgttgta

SEQ ID NO: 2295 - DNA, 1358 bp, Artificial Sequence
  chemically treated genomic DNA (Homo sapiens)
gaatttaaatagtttgagggattttcggtgaaagttagttttaattagtgtatacgtatatatatattaatatgtgtgaatgtgttgtgtgtacgtgtgtgtttgtataagtttatatggtatatttatttgttagggataggttatggataatgattgttttttggatttttttttaaaaagttagattagataagtttattttgtatattttgggtaaatgtgtggtatttcgtgagtttggtagtttgtgaaaaaaaaaaaaaaaaaaaaaaaaaaaaaagttgtttgttttgagtttatggggtaggggtaatttttttatttgataatttgcgtgtttttgttttgtttgtttattttggttttataatattatattttttttttaattaatttttttttatttgggttggacgtgtttgggtttttttttttggtttcgtttttattttttttaggtttttaaatttttagagaatttgtgttagtgttttgaattttttagttgttttagtaggaaaattagatagattaggagttggggtatatttggttgaaagatagtttttcgttttttttttatgttgttttttttttttttttttttaaatagatatataaatatatgtatttttttgtttaaattgagcgaattggttttttgtttgtgttttgatttagttattgggtttagttttgttttttttttttttattcggataggagttattgggatttggagttttagtttttaaattgaagttggttttaggttaggtgattttttttttgtaagttttttttttaagcgtggggttggggggaggcggggaatggggggggttgtagggatttgtttggtgttgttgaagggggggcgagtgaggaaaggagggggttggaagagagtaaagggttgttgttaaatagttttttatcgtaagagggagtttagatttagatttttttagttaattatataataaatttagtttatcgtaataaaaagtagtttagagtcgattggtttttttaggtattgatttcgaataggatttttttatttaggtattttttttagagggattcgttagttcgtttagtagtattatgtgggtgattaaatttttgttagttttgttgttgtagtatgtttttttgtatttttttttgttttttatcgttattttttatgtaggttagtttttttttttttttttattattagtattagtatttaatatttttgttaattttttttattttttttaatattttttttttattttatttttagtattttttttgaatttagtatgtagtataggtttttaaaagtttttattatgtttttt

SEQ ID NO: 2296 - DNA, 1358 bp, Artificial Sequence
  chemically treated genomic DNA (Homo sapiens)
aaaaagtataatgagagtttttagaaatttatattatatattgagtttagaaaggatgttgggaatagggtaaaaagagggtgttaaaaggaatagggaaggttagtaggagtgttaaatattaatattaataatgaagaagaagaagggaattaatttgtataggggatggcgatggggagtaggaggagatgtaggaggatatgttgtagtagtagggttggtaggagtttggttatttatatggtgttgttggacgggttggcggatttttttggaggagatgtttgggtgaaagaattttgttcggagttagtgtttaaaagagttagtcggttttgagttgttttttattgcgatgagttaagtttgttgtgtgattaattggaaagatttaggtttgaatttttttttacggtaagaaattgtttaataatagttttttatttttttttagtttttttttttttttattcgttttttttttaatagtattaaatagatttttgtaattttttttatttttcgtttttttttaattttacgtttaggaaagaaatttataaagaaaaggttatttggtttgaggttagttttaatttggaagttggagttttagattttagtggtttttattcgagtaaggaagggaggagtaaggttgagtttaatggttaaattaaggtataggtaggggattaattcgtttaatttaaataggaaaatatatgtgtttatatatttatttgggaaaagaggaaggggaagtagtataagaagaaagcgaagagttgttttttagttaaatgtgttttagtttttaatttgtttagtttttttgttagagtaattgagggatttaaaatattgatataggttttttaggggtttagagatttgggagaggtgggagcggggttagggaggagagtttaggtacgtttagtttaggtagaaagaggttagttaagaaaagggtgtggtattgtggggttaaaataagtaagtaaaataaaagtacgtagattgttagatgaaaaaattgtttttgttttatgggtttagagtaggtagttttttttttttttttttttttttttttttttataaattgttaaatttacgaaatattatatatttatttaaagtatataaaataaatttgtttgatttgattttttaagagaaagtttaagaaatagttattgtttatagtttgtttttgataggtaaatatgttatgtggatttgtataggtatatacgtgtatataatatatttatatatgttggtgtgtatgtacgtatatattggttaggattgatttttatcggaaattttttaagttgtttgaattt

SEQ ID NO: 2297 - DNA, 2701 bp, Artificial Sequence
  chemically treated genomic DNA (Homo sapiens)
  unsure 98, 147, 386, 2432..2433, 2435..2436, 2482, 2493, 2495, 2501: n is a or g or c or t
  unsure 2550, 2564, 2603, 2670: n is a or g or c or t
ttgtagagtatttaacgtgtagtaaagtgttttagttttgtaaagggtagttggaaatggatttaaaatggtaacgcggattaattagcgttgtcgtntaaaagtagatatttatacgcgttttttttatatgtatagcggaatttngcggtgtttaatttttgtttagggttgtaaagtaggcgtttttattttacggtggtttgtatttttgaaaaaaataaatttttttttaggtgaaagtttttattttggaattagtttaaaataattttgggtgtgatgtgtgaaaatttgaatttaatttttttagagttttgtgttatttaaggatgaaaagaggtatatttaaaaatgtattttattttttaaaaacggattgtggntattatggtgtttatataatttagaatagtttaggttataaaattaggatttggtagaaagagagtttttaggtagaaggttaaatcgaggtaaattgaagggagagttgggtagtgagtgtaattgtggtgttaggaatttataaggtgttttttattttgggaatatcggattttcggggagggggatggggagggaatttcggttgtttttagttttttttggagaaaaaagtttaatgaagaagttggggcgttttgtgtgtgtatattgtttgtatgtgtttgcgaatgtgtatgtttatttgcgtgtttgtgtgtatgtgtgtgtgtgtaaatgcgggtgtttattagcgtatgaatgtttttcgtgtttacgtgtatttgcgtgtatgtgtttatacgcgtgttcgtgtgtatttgtatgtatgttttcgtgtatgtgcgcgttcgttcgcgcgtaggttttgtggtgagggtatttcgaggcggagtacggttgttaggggattttttttattttattgtagtttttttttatttatagtgaatcggtgcgttgtttgaggtgtagtttagacgttttttgtaaagtgttggttcggtacggtagaggcgtaggtaaaggttaagtttcgaaacgtggtttcgggatagttacgttttcgcgtttttttaggataattgtttaggggtgatttcgagaggcgggtggagttaggtttacggcgagttagttcgggatttcggtttgttttttaattcgtcgtcgggcgggagtacgtgagcggggtttcgggtggtattcgggcgtcgtcgtcgtcgaggtagttgtatttcgaacgttgtttttggttagtagttaggcgttttggttcggcggttcgtttggttttttttttttttatatttttttttttgcgtaatttttttttttttattcgtttacgattagaggtgggtattttttttattattattttttttttaagcgtaagcgcgtgtacgtatatatattatatatatttatatttatatatatttatatatatttattttatttgaattttggggtaggaatttagaaaatttttagttcgggtagcgcgcgtttggtgtaagatttaggagttagtagttcgttttttttcgatttttcggtgtcgtcgttgtttgttttcgttattttaggaggcgcggtgttatttattattttgttttttgtttgtgtttcgtgttcgattttatttcggcggagtttttttatttttttttgtttttcgattgtttaaggtatttttaattttaattttttttttttttttttttttttttttgtttttttttttttttttttttttttttttttcgtagggtggggggaagaggaggaggaatttttttttcgtttaatattttaagggatataatttattttaagttttttttttttttaagtcgttttcgaagtgttttcggtgttcgtaatttttgattttaattcgcgagaggagtttttgcgattttaaagttttttttttttttttttcgttttttttttttttttgttatttttatttttatcgttatttttattttcggtatttatttatcgtcgtcgtcgttatcggtagcgtttttttttttttttttttttttttttttttttttttttggtagtcgttggacgttcggtgttgatggtggtagcggcggtagtttaagtaatagtagttttcgtagttcgttagttcgcgttcgtttcgtcggcgtttttagttttattattttatttttcgaaaggtgttgggtagtttcggggcggtcgaggcgaagcggttgtagcggcggtagcggcggcgggaggtaggatgagcgtacgcggtgagggcgcggggtagtcgtttattttagtttagggataatttgtcgttttagcgttttagaagagaggacgcggtcgttttaggaagtagtagtaagttagtacgagggcgcggtgggggtattagtttatttcgtttttattgtcggggtttagatatnnnnnnggcggtcggagtgcgggagtttagtcgtcgcggtcgtcgtatatngttcgtcggtngntcgggngggagcggcgtagattttacgagtgcgtcgcgcggtttcggggcgttantaatttttcgggtngggaggtggggagtcgcggcgggcggttcggggaaggtnggaggtggggtcgggcgaagcgcgttttcggattttcgttattgtgtacggtttcgagtggcgcggngtcgtttagtgattggaagcgatcgggattt

SEQ ID NO: 2298 - DNA, 2701 bp, Artificial Sequence
  chemically treated genomic DNA (Homo sapiens)
  unsure 32, 99, 138, 152, 201, 207, 209, 220, 265..266, 268..269: n is a or g or c or t
  unsure 2316, 2555, 2604: n is a or g or c or t
ggatttcggtcgtttttagttattgggcgatntcgcgttattcggggtcgtgtataatagcgaaagttcgaggacgcgtttcgttcgattttatttttngtttttttcgggtcgttcgtcgcggttttttattttttngttcggagggttgntggcgtttcggggtcgcgcggcgtattcgtggggtttgcgtcgtttttnttcggntngtcggcgggtngtgtgcgacggtcgcggcgattgggttttcgtatttcggtcgttnnnnnngtgtttgggtttcggtagtggggacggggtgggttggtgtttttatcgcgttttcgtattgatttgttgttgttttttggggcggtcgcgtttttttttttgaggcgttggggcggtaggttgtttttgggttgaagtggacggttgtttcgcgtttttatcgcgtgcgtttattttgtttttcgtcgtcgttatcgtcgttgtagtcgtttcgtttcgatcgtttcggagttgtttagtatttttcgggagatgaggtgatagggttggggacgtcggcggggcgagcgcgagttggcgggttgcgagggttgttgttgtttaggttgtcgtcgttgttattattaatatcggacgtttagcggttgttaaaaagagaagaggggaggaggaggaggagaggaggaggcgttgtcggtggcggcggcggcggtgggtgggtgtcggaggtggaggtggcggtggaggtggaggtagtaagaggaggagggaagcgagggagaaggaagagaggttttgaggtcgtagaggtttttttcgcgggttgggattaggagttgcgggtatcgggagtatttcggaagcggtttggaaagggaagagatttggagtgaattgtgttttttgaaatgttaggcggggaaagaattttttttttttttttttttattttgcgagagagagagagagagagagagagagagagatagagagagagagagagagagagaagagattgagattgaaagtgttttgggtagtcggaaagtaaaggaggatggggagatttcgtcgggatagggtcgggtacggagtataggtagaggatagagtagtgggtggtatcgcgttttttagggtggcgggagtaggtagcggcggtatcggagagtcggagggggacgggttgttagtttttgagttttgtattaagcgcgcgttgttcgggttggaagttttttgagtttttgttttaagatttaagtgggatgagtgtgtgtgagtgtgtgtgagtgtgagtgtgtgtggtgtgtgtgcgtgtacgcgtttgcgtttggggagggggtggtggtggggggagtgtttatttttaatcgtgggcggataaaggggagggggttgcgtaggaagaaaagtatgaggaggagggaggttaggcggatcgtcgagttaaggcgtttggttgttagttagaggtagcgttcgaaatataattgtttcggcggcggcggcgttcgggtgttattcggagtttcgtttacgtgttttcgttcggcggcgggttaaaggataggtcgggatttcgggttggttcgtcgtgggtttagttttattcgtttttcgaggttatttttgggtagttgttttgggaaggcgcgggaacgtgattgtttcggagttacgtttcggggtttggtttttatttgcgtttttatcgtgtcgagttaatattttgtaggaagcgtttaggttgtattttaggtagcgtatcggtttattgtgagtgggaagggattgtagtggagtgggagaggttttttgatagtcgtatttcgtttcggaatgtttttattatagagtttgcgcgcgggcgagcgcgtatatatacggagatatgtatgtagatatatacgaatacgcgtgtaagtatatgtacgtagatatacgtggatacggggggtatttatgcgttggtaaatattcgtatttatatatatatatatatatataggtacgtagatagatatgtatattcgtagatatatgtaaataatgtgtatatatagagcgttttagtttttttattgaatttttttttttaggaaagattagaggtaatcgaagttttttttttattttttttttcgggaattcgatgtttttagggtaaagggtattttgtagatttttaatattataattgtatttattgtttaattttttttttagtttatttcgatttaattttttgtttgagaattttttttttgttaagttttaattttatggtttgggttgttttgagttatgtgaatattataatgnttatagttcgtttttaaaaggtggagtatatttttaaatgtatttttttttatttttgaataatataaaattttgaaaaaattaggtttagatttttatatattatatttaaaattattttggattaattttaaaataaaaatttttatttggggaagaatttattttttttaaagatatagattatcgtggaataaaaacgtttattttgtagttttaagtaggagttaggtatcgtnaggtttcgttgtgtatgtggaggaggcgcgtgtaaatgtttgtttttgngcggtagcgttgattggttcgcgttgttattttaaatttatttttagttgttttttgtagagttgggatattttgttgtacgttgagtgttttgtag

SEQ ID NO: 2299 - DNA, 1651 bp, Artificial Sequence
  chemically treated genomic DNA (Homo sapiens)
aagttttttaagaatcggggaaacgcgttttttagtcgcgttgttgttgtttttaatgaattttttttagtttcgtatttttcgtttatttttttttttttttgtttatttttttttttttttgtttattttttttttgtttagtttttttttggttatttatttttgtttcgtcgagatcggatcggcggcgggggtattgtttttggagtcgggcgggaggggagggcgcgtgcggggtggtcggcgtagtgcggtgggggcgggagcgggtgggtacgcgcgcgtgtttttgtgtgcgcgcgggaggcggtggggcgggagatgggggcggcgtttcgtagtttcgcgttttacgttcgggtttcgtttcgtacgttttggggaattcgggtttcggttttttgcgcgcgtcggtttgggtcgggttttcggcgcgtcgttgttcggcggtggtcgttcgagtgtgcgagcgggcgcgtgtgcgcgggttagggcgtcgcgcgcgcgagtttttagtgtgtggtagcggcggcggcggcgcggcgaggttggggtttttgtttattagtattaattcgttgagcggaaaaaaaaagggaaaaaattcgaggaggagcgagcgtattaggcgaattcgagagaggcgggagagcgagagggacgtcgttagcgagtttgtttacggtcggcgttcgtagattttcggtttcgtttttcggattttttcgcgttttttacgtttttttcgcgcgggggtagttttacggcgcgtttcgtttcggttgtgatttttagcgagtcggagttttcgcgtagagtaggcggcggcgggcgggggtcgggcgggggtcggcgcggggcgggcggcggcgtagagtcgggcggcgcggcgggagtgttgagcgcggcgcggtcggttcgtcgttttgtgtgtgttttggatttgggaaggagttcgtcgcggcggcggcgttgagggaggaggcggcggcgagcggagttaggaggaggaggaggaggagggggagtcgtttatttattttgatttcgcgtttttgtttttcgtcggtttcgtttgtgattcggatttcggggcgattttgcgaattgcgtcgcgttttttcgcggcggaagttcgggcgttcggtcgtttttcgcgcgttagggtcgggtttgttttttttcgtttaggtagatttgggttttgttttttttttttgtagtttttttttttttttgttttttcgggtttgaaaatggaggtcgacgacgtcgatagttcgtttcggcgcgtttcgggttttcgatttcgtcgagttttgggtcgttgttgtcggcgttgaggggtcgtttcgcgtcgttcgtttcgttcgcgtattcggagggtttcggcggcggtttttcggagtattgtttttttcgtttttgtttttggagggggagcgaagattgagtttgagatttgtttttttttatttttttttttttttttttttttttttttttttttttttttttttttgagaaaggggaattttattttaaataaaaggaatgaagtttggtttcggaggagggttttcgatttcgttgtgggggtttttgttttttttcgtcgcgttttcgttttggtcgacgagtggagaaa

SEQ ID NO: 2300 - DNA, 1651 bp, Artificial Sequence
  chemically treated genomic DNA (Homo sapiens)
tttttttattcgtcggttagagcgagagcgcggcggagagaaataggagtttttatagcgaggtcggggattttttttcggagttagattttattttttttatttgggatgaaattttttttttttaaaaaaaaaaaaaaaaaaaaaaaagaaaagaaaagaaaaaaaggaaatgaaaggaaataagttttaaatttagttttcgttttttttttaaaaataagggcgaaggaaataatatttcgaagggtcgtcgtcggggtttttcgggtgcgcggacggggcgggcggcgcggggcggttttttagcgtcggtagtagcggtttagggttcggcggagtcgggaattcgaggcgcgtcggggcgggttgtcggcgtcgtcggtttttatttttaaattcggagaggtaggaaggggggaaaattgtaaagaaagggggtaaagtttaaatttgtttaggcgaggaaaaataagttcggttttggcgcgcgggaggcggtcggacgttcgagttttcgtcgcgggagggcgcgacgtagttcgtaagatcgtttcgaagttcgggttataggcgaggtcggcgaggggtagaaacgcggagttaaaatgaatgagcggttttttttttttttttttttttttttggtttcgttcgtcgtcgtttttttttttagcgtcgtcgtcgcggcgagtttttttttaaatttaggatatatataaagcggcgggtcggtcgcgtcgcgtttagtattttcgtcgcgtcgttcggttttgcgtcgtcgttcgtttcgcgtcggttttcgttcggttttcgttcgtcgtcgtttgttttgcgcgggggtttcggttcgttgaaggttatagtcgaggcgaggcgcgtcgtggagttgttttcgcgcgggaggggcgtggagggcgcggggggattcggggagcggggtcgagggtttgcgagcgtcggtcgtgggtaggttcgttggcggcgtttttttcgttttttcgtttttttcgagttcgtttggtgcgttcgttttttttcgggtttttttttttttttttttcgtttagcgagttaatgttggtaaataagagttttagtttcgtcgcgtcgtcgtcgtcgttgttatatattgggggttcgcgcgcgcggcgttttggttcgcgtatacgcgttcgttcgtatattcgagcggttatcgtcgagtagcggcgcgtcgagggttcggtttaggtcggcgcgcgtaaaaaatcggagttcgggttttttaagacgtgcggagcggagttcgggcgtggggcgcgagattgcgaggcgtcgtttttatttttcgttttatcgtttttcgcgcgtatatagagatacgcgcgcgtgtttattcgttttcgtttttatcgtattgcgtcggttatttcgtacgcgtttttttttttcgttcgattttaaaaataatgttttcgtcgtcggttcggtttcggcggggtaggggtgggtagttagggaaaggttaggtaggggaggggtgggtaggagaggggaggggtgggtaggagaggggaggggtgggcggggagtgcggggttgggagaggtttattgaaaataataatagcgcggttggaaagcgcgttttttcggtttttgaaaagttt

SEQ ID NO: 2301 - DNA, 1160 bp, Artificial Sequence
  chemically treated genomic DNA (Homo sapiens)
tttagaagttggaaaagttaaagatatagatttttttttagaatatttagaaggaatatatttttgtttatattttgatttaagtttagtgttatttttgatttttagaattgtaataaaataaaattgttaaattattaaatttgtggttatttttgatagtagtaataggaaacgtttaaggatttttgttttttttttttttagttttattgatttttataggcgtttaagtattaatgtgtattttttcgatttattttttatttttttgaaaaatatgtagaaagtttgtcgtgtgttttaaaaaatgtacgtatggtatttttttttatgtttggaatgttttttttaaaattaatattatgtattgttagtttttaaatatgttttttgttttttttataaagtatagtattgttagtgtttttaattttatttagtgaagtagggttggtattattaattttggagttagcgttagtaaataagggtttagaggttaagggttggaagttaggtttttagatttttaggttaaggttttttttcgtagatgattttgttttggtgtttagtagggtatagtttttagtattttcgaggtttcgtaagtgtgttggtagcggcgacgtcggtttcgttacgcggagggaggaggtttaggtagcgttcggagtgggcggcgacgtggtggaagaagtttttttcggttagagatcggacgcgggagttgcgggtgggttaaggtgtttagttttgggagtcgtaggagtcgttagagtcgttagagtcgtcggcgtttcgtttcgtttttttcggtcgttttcgtcggtttaggttatttgaggtcggtgggcggggcggtttttttcgtttgcgtcggtttttagtttttagggcggcggagtcgggaagtggaagagggagcgaaggaggcggggattgttaaggttttagttcggtcgggtttcgaggcgagaggttgtatggagtggtcggcgcggttttgcgggttgtgggcgttgttgttttgcgtcggcggcgggggcgggggcgggggcgtcgcgtttacgggtgagtgcgattttcggggttcgaggggcggtcggagggttgagggcggtgagggttacggttgaaaggtttcggaggtcgat

SEQ ID NO: 2302 - DNA, 1160 bp, Artificial Sequence
  chemically treated genomic DNA (Homo sapiens)
gtcgattttcggggttttttagtcgtgatttttatcgtttttagtttttcggtcgtttttcgggtttcgagggtcgtatttattcgtaggcgcggcgttttcgttttcgttttcgtcgtcggcgtagagtagtagcgtttatagttcgtagagtcgcgtcggttattttatgtagtttttcgtttcggagttcggtcgggttggagttttggtagttttcgtttttttcgtttttttttttatttttcggtttcgtcgttttggaggttgggggtcggcgtagacgggaagggtcgtttcgtttatcggttttaggtaatttgagtcggcgagagcggtcggaggaagcggggcggggcgtcggcggttttggcggttttggcggtttttacggtttttaaggttggatattttggtttattcgtagttttcgcgttcggtttttgatcgaaaaaaattttttttattacgtcgtcgtttatttcgggcgttgtttgggtttttttttttcgcgtggcggagtcggcgtcgtcgttgttagtatatttgcggggtttcggaggtgttaggggttgtgttttgttggatattaggatagagttatttgcggaaaagagttttggtttgggagtttggagatttggtttttagtttttgatttttgagtttttgtttgttagcgttgattttagggttagtaatattagttttattttattgggtggagttggggatattggtagtattgtgttttgtgaaaaggataaagggtatatttgaaagttggtaatatataatgttgattttaaaaggaatattttaaatatgagggaggatattatacgtgtattttttaaagtatacgataaattttttatatattttttaaagggatgggaggtgaatcggaagaatatatattgatatttgggcgtttatgagggttagtgaggttgggaggaaggaaaataagagtttttaggcgttttttgttgttgttgttaaaaatgattataaatttagtgatttaatagttttattttattatagttttggaggttagaagtgatattgagtttaaattaaggtgtgggtagagatgtattttttttggatattttaggggagaatttgtgtttttgatttttttagtttttaga

SEQ ID NO: 2303 - DNA, 4163 bp, Artificial Sequence
  chemically treated genomic DNA (Homo sapiens)
  unsure 3068: n is a or g or c or t
gcgtggttgacggttcgggttggtaaaagtgatagtgatttttagaagagtttggaagagagagagaattttttatgtttttttgggtatattttatttatttgtggttaggtaagaggatgggtttataggttgagtgtttttaggattagatttaaattttgagtatgggtaaattagtaagttagtgttagtagggttagaatgaaagtttttttttgttttattagagagaaattgttgtttaggatttagttgaggattgattatgaaaagatgggtttgaaggttgatagataattgaagttttagttttgtttgttggtatttgggtttttatttataatatattggaatttaaggttttttttttgtgttattttttatttattatgaaggaaaaatattagggtttttgtagggttttagtttttgtatgtggatttttgagtgttttgtttgtagggagaatagtggtttaaataattaaaaaggggtttggtacggtggtttatgtttgtaattttagtattttgggaggttgagtcgggtggattatgagtttaggagtttaagattagtttggttaagatggtgaaattttgtttttattaataatataaaaattagtcgggtatggtggtaggtgtttgtaattttaagtacgtaggaggttgaggtaggggaattgtttaaaattcgggaggagtggtttttttttaagggttattgtgaggattaaaggtaattatttaaggtaagtatttgatagtattttaggtatattagtatttaattgttatgattttttttttattaggttttttaaagtttttttttttattttttgtataaaaggtagattgattgatagatagttgttgtgtttagaattattttatgcgtaggttaattatattgagtatttttatgtatattgtgttaattaaattttataattatttgatggtgagagttttagttgtgtaaagagggaattgagaaattcgtttaagtttatattgttagtgggttatagttatttattatgtaatgttgagtttttttattttaatttagaagttgttttttttattacggaatggttttgtaggggttttggttttttttttaagtatatcgtgggtaggtgggagggggtttttggaaattttttaaaataatttatagtgagggttggtaagttttaggaggggtagcggtggagacgggatgttgagtaggaggggtgaaagtgaaggagggaggaggaagttaggttattaaaaaggaagtgtagttttgtagagcgttggtaggatgtggttggttagtaatatatgatggagttattagatggatttgtttttttatttttttttttaagtttatattttatttttttttgggtttgagatttatgagtttagaagggtaaattaggagtagttagttgagaagttagttattttgttttttttttggaggtttagaaaaggagtgtagttgttatagtaggtttgttttagtgatgtttttggtagagttatatagggttagggaatattttcgagtaaggcgtttggagaaggaattggggtgtttttagggaagtttaggtaaggaattttttataggttattttttatgttttgtgtgttttagtagaatatagggtttttttttgtatttgtttttaatagtatcgttttttggagataaggtcgttttgtagttgtttttttttgtttgttttggtttgttttacgtggttagtagattttttttttataaatatttttataaaagtaattagtacgatataattttattgggtattggagaggcgggggttatagagaaaggattatagtacgtaatagaaaataggaagtaatttgtttgaggttatttttaaaatttttttgattatttttggggattttttattggatgttttttttcgtggttatagtgtttattgttttatttttttatttttttttgttttgtagttttttttttatagggttttaagattgttgttaagttgttatggatgatttttaagttttttttatttaattttaatttaaggggatttaatttttataattaatatgaattttgggatattttttttaataaaaaattaatattttttttataaaaaattagtttaaattttttttcgtgttttaaaaaatttgtttaaaaaaatataataggattttcgaagaatttttttttagaaaataaataaaaaaattaaataaaaacgtattttttttttattatgttgaatttgttttttttttttttttttttttttttttttttttttttatttattaagtatggttttaggaaatattagtaagagaaaaatttgtgtaaaattaaatttattttaggggttaattttgaagttttttatgaagaggatgtaatattggatgtgttgatgaaaagataaaaatatatttgtgttgttttaagttgtaaagttgtattgattgtagttggtattatatgtggttgtttgtaaaagagttaataatttatgaatgttaatagatgttaatttatagagtttttaattaggtgaaattaaattttatttttatgtaattttttttgtggataagagatttagagattattaggttaatatttggagtttttaatgttatgatttagttttaatttttttaagggttagttcgagaagtttaatgatttttttgaaattggttgattttttagtattttataatgtttttttaaagtttagttttatagtagggaattcgagttgaggtaatgttttgtgaatatatttttaatttttgtagatttttgttttttttaaaatgtttattgttaatgtagattttaaattttaggttatggatatttgttattgtttttttagttttaaaggatgtatttgttttttttttttttttttttttttggaaggaagtttgtagttatgttaaatggtttattattatataaatttggaatgaatcggacgtggaggttatcgtagtatagtaaagtantttttttgtagataattaaatataggtggtattattttgatgatgtttgtttttttaatttttttttttagatgggtattatgtttggttgggttatgtttttggaatattatttttttgtttttttgtttgtaaaatttttattttgtttatgaagtagatagaaagtatttttttaggaagttttttttatttttgggatggaattggtttttttgtttttttttgggttttgatagtattttaagtatattgtgtgataatttaaattttttaagtattgtatagttatttagagtttggtttattttgtttttaggttgttttgggaggattttaaggttgtatttaggtttagtggtggaaataattttgtaatagattgaggatgttattttaggtgttatagaggggagtaatggtataggtgttgagtatttgttattttttgtagaatatttattaaatatttgaagagtgtttaataagtgatagtaattgataagtatttttttgagtgttttaattttagggaatattagttgttaggtttttttgttgttttgtttgtacgttgttttatattttttcggggtgggtagtttattagatgtagttgtaattgaagtaatgttagtttttttatatttaaagttttttgtttttattataaagagttagggtttttaagtatgttaatagtatgagtttatgatttggatattaggttgttggaagttaagggatgttttgtatgtttaggaggtgttggttttgttacgttagtattaaggagaaaagaattttttttatatggttgttgatgaattttttattgaaagtagtttaatattcgttttttcgttttaattaaagcgtgtttcgtttttttatagtttgaggttatcgttttgatatggtttcgttttttgtttatattataggaagcgagagagttgttgttattgttgttattataggaagatatagtagggagaagttttagtgtttttgtcggttgtttaggatttggtatcggtttatagattaagttttttatagagggcgagttagggtggagaagagttagtttag

SEQ ID NO: 2304 - DNA, 4163 bp, Artificial Sequence
  chemically treated genomic DNA (Homo sapiens)
  unsure 1096: n is a or g or c or t
ttgggttggtttttttttattttggttcgttttttgtggaggatttggtttgtgggtcgatattaggttttgggtagtcggtagaggtattagggtttttttttgttgtgtttttttgtggtagtagtagtggtagtagttttttcgttttttgtggtgtaaataggaagcgagattatgttaaaacggtagttttaagttgtgagaaggcgagatacgttttgattgggacggaaaaacggatattgagttgtttttagtgagaagtttattagtagttatgtaaagaggatttttttttttttggtgttgacgtggtagagttagtattttttagatatgtagagtattttttgatttttagtaatttggtatttaggttatgggtttatattgttgatatatttgaagattttgattttttatgataggaataaaaggttttgagtgtggagggattggtattgttttagttataattgtatttggtgaattatttatttcgggagggtatagggtagcgtataaataaggtagtaaaaaaatttggtagttagtgttttttaaggttagagtatttaggaaaatgtttgttaattgttgttatttgttaagtattttttaaatatttagtaagtgttttgtaaaagatgatagatatttagtatttgtgttattgtttttttttgtggtatttagggtgatatttttaatttgttgtagaattgtttttattattgagtttggatgtagttttggggtttttttaaaatagtttagggataagatgaattaggttttgaatagttatgtaatatttgaagagtttggattattatatagtgtgtttaaggtattgttagggtttagaggaaaatagagagattagttttattttagaggtggagaaggttttttagagaagtattttttgtttgttttataaatagagtaagaattttgtaggtagagaggtagaaaaatagtgttttagagatatagtttaattaaatataatatttatttggaaaaaaagattgagaaagtagatattattaaaatgatgttatttgtatttgattgtttgtaagagaantgttttgttatattgcggtggtttttacgttcggtttattttagatttgtgtaatgatgggttatttgatatggttgtaggtttttttttagagaggaaggaaagaggaaggaataaatgtattttttgggattaaaaaagtaatggtaaatatttatgatttgaaatttaagatttatattgataataaatattttggaggaagtaaaggtttataaaagttagaagtgtatttatagagtattgttttagttcgagttttttattgtagaattgagttttaggagagtattatgaaatattgagagattaattaattttaaaggaattattgagtttttcgaattagtttttaaaaaaattaaggttgagttatggtattagaagttttaaatattggtttgatgatttttaagttttttgtttataagagaaattatatggggatgaaatttaattttatttggttgggagttttgtaagttgatatttgttgatatttatgaattgttagtttttttataggtagttatatgtgatattaattgtagttaatgtagttttataatttagaatagtataaatgtgtttttgtttttttattaatatatttaatattgtattttttttatgggagattttagaattagtttttgaaataaatttgattttatataaattttttttttattagtgttttttggaattatgtttggtggatgagggagggagaagagaaagaaggaaagagggagagagtagatttagtatagtggggagaaagtacgtttttgtttggtttttttgtttgttttttaagaaaggatttttcgaaaattttgttgtgtttttttaagtaagttttttaaagtacgggggagagtttaggttgattttttataagagggatgttagttttttgttgaagaaaatattttaaagtttatattggttgtgagagttaagtttttttgaattagagttagatgggaaagatttgggggttatttatagtagtttgataatagttttgggattttgtagagaaaagattgtagggtagggaaaagtgggagagtgagatagtggatattgtggttacggaagaaaatatttagtgagaaatttttaggaatggttaaggaaattttgagagtgattttaagtaaattgttttttgttttttattgcgtgttatgattttttttttgtgattttcgtttttttagtgtttaataaaattatgtcgtgttgattgtttttatggaaatgtttgtgggagaaggatttgttggttacgtgggatagattagagtaaatagaggagggtagttgtagaacggttttgtttttaggagacggtgttgttgggggtaggtataggagggagttttgtattttgttgaggtatatagggtatgaaagatgatttgtgggaagttttttgtttgggtttttttgaggatattttagttttttttttagacgttttattcgggaatattttttgattttatgtggttttgttaagggtattattgggatagatttgttgtggtaattgtattttttttttgggtttttaggaggaaggtaaaatgattggttttttagttggttgtttttgatttgtttttttggatttataggttttaggtttaagggaaaatgaaatatgggtttaaaagagggggtgggagaatagatttatttgataattttattatgtgttgttaattagttatattttgttagcgttttgtaaaattgtattttttttttagtaatttggttttttttttttttttttatttttattttttttatttaatatttcgtttttatcgttattttttttgaagtttgttaatttttattgtagattgttttaggggatttttagaggtttttttttatttgtttacggtgtgtttaagggaagggttagggtttttgtagggttatttcgtgatgggggagatagtttttgggttaggatggggaaatttagtattgtatagtgggtaattgtgatttattagtaatgtgaatttgagcgagttttttagttttttttttgtataattgggatttttattattaggtggttgtaagatttaattgatataatgtatatgaaagtatttagtgtggttagtttgcgtataaaatggttttagatatagtagttgtttgttagttagtttgttttttatgtaaggggtggaaaggagggttttaaggggtttgatggggaaaagattatagtaattgaatgttaatatgtttgagatgttgttaggtatttgttttaagtggttatttttaatttttataatagtttttggaaaggagttatttttttcgggttttaagtaatttttttgttttagttttttgcgtatttgggattataggtatttgttattatattcggttaatttttgtattgttagtagagatagggttttattattttggttaggttggttttgaatttttgagtttatgatttattcggtttagttttttaaagtgttgggattataggtatgagttatcgtgttaggtttttttttagttatttaagttattattttttttataagtaggatatttaaagatttatatgtaaagattgagattttgtaggggttttggtattttttttttatggtgagtgaaaaatgatataagaaaggaattttaaattttagtgtgttatgggtgggaatttagatgttagtaagtaggattgggattttaattatttgttaatttttaaatttatttttttatggttagtttttagttgagttttaggtaatagtttttttttggtggaataggaagaaatttttattttggttttgttaatattaatttgttaatttgtttatgtttaagatttgagtttggttttggaaatatttaatttgtggatttatttttttatttggttataggtgggtggggtgtgtttagaagagtatgaggagtttttttttttttttagatttttttgagggttattgttatttttattagttcgggtcgttaattacgt

SEQ ID NO: 2305 - DNA, 907 bp, Artificial Sequence
  chemically treated genomic DNA (Homo sapiens)
aagtttgaagttagtattgttgtttttttatttttagaatatttttgtattataagttatattttttcgttagttttaatagggatttagtttaggtagtagttaagggtgggtattttggtttggattagattagaggaaagatagttgtatatgtgtttataggagttaagacggtattttttatttttttaaaataggtatgagttttgatagagatttaagggtgattaagttaaggaagaggtatggtatagaacggtgatgtcgggggtggggggtttagaatttttattatagaaggtaatgatttagaggagaaggtggttgagaatggtgttagtggtagtgaatagattttttttaggatttaggtgggttgaggatttttgagtttgtgatattattgtatatttagttttagtttttgtttattattttatagtagtatttaattttttagaggatttagttcgtgttatatagtatatatttgttatattttttgtaaagttttggttataaggttttttttatcggaagttatgatagaggaaacgtgtgggtggggaggggtagtgggtgagggatttaggtttttgatatagatagattatatttagggaatgaagagtaagcgttatgttgaagttattattattatttatattttttttatttttgtagttgtttttgttgggagtggggttgaatacgataattttgacgtttaatgggaatgaagatattatagttggtgggaaatttgggattggagggggttggtgagaagggtggttgtgggaaggggtcgtatagagatttggtgtttgttattggttattataattatgtgggtagaattgaaaagtggagtgggaagggtaagggggagggtttttttttt

SEQ ID NO: 2306 - DNA, 907 bp, Artificial Sequence
  chemically treated genomic DNA (Homo sapiens)
agggagggaatttttttttttgttttttttattttattttttaattttgtttatatgattgtaatggttagtggtaggtattagatttttgtacggtttttttttatagttattttttttattagttttttttagttttagattttttattagttgtggtgtttttatttttattgggcgttagaattgtcgtgtttagttttatttttagtaggggtagttgtaggaataagagggatgtgaatggtaatgatggttttaatatggcgtttgttttttattttttgggtgtagtttgtttgtgttaggaatttgggttttttatttattatttttttttatttatacgttttttttgttatagttttcggtggaaagaattttataattagggttttatagagggtgtggtaaatatgtgttgtgtgatacgggttaagttttttaggagattaggtgttgttgtaaggtggtaaatagaaattaaagttggatatataatagtgttatagatttaaaaatttttagtttatttagattttgggaaggatttgtttattattattagtattatttttaattatttttttttttaaattattattttttataatggaagttttgaattttttattttcgatattatcgttttatgttatgttttttttttgatttggttatttttaaatttttgttaaagtttatatttgttttgggaggatggaaaatatcgttttggtttttgtgggtatatatatagttgttttttttttgatttaatttaaattagaatatttatttttagttgttgtttgagttgggtttttgttgagattggcgaggaagtgtgatttataatataaaaatattttagaaatggaggaataataatattagttttaagttt

SEQ ID NO: 2307 - DNA, 2253 bp, Artificial Sequence
  chemically treated genomic DNA (Homo sapiens)
aagtttattttattttttcgtggggtattttttatttatttatttaatttttttttagtattttatttattgagttgatgatttaggttttggattagtaggggaagtatttttgggtaggtattagatgtagttaaagtaggtgggtaggtatcggttgtagttaaagtaggtgggtagagattttagttttgatgagagtgtttgggagagtttttaattagatgtgttgaggttttgttagggtgaagggtaggagttattttaggttttttattaggttagttggaaagttatttattttttagttttattttttttttagtgttttagttatttagattagataggtagttatttttatttgtagaaatgttgatgttttaagtagagaggaattgtgattgtttgttatgtaaatttgaatttggggagtgtttttttcgtggggatgtaattattttgatttgttttaggaaggttgtttataggtgtattaatgttgcgtttttttgggagaagttttagttttgtttgtagtggcgtattagggggaataaggattttttttttaagattttttataatattagaggttgtttgtttattgggtagaggtgtaaatttttttttattttgtttagtatagtaattgtttttgtaataggaaattttttattagtgaaaagatttgggatttaagttttgttatttagatttttttgttttatagggtatttttttgatgtgatgttttttttttttttttaggaatgggattttttggaagttagattatagtgtttttttgggtttagttatttagtgggtttattagattttgggttggtgttagggaatgtttgtaagggatttagtggtgttatttgtttttaagatttttagtagtgaatattagtattatttttgatagaagtgggaggggagtgatgtaaattttgtaagattttttggttgtagatagatttagagtattgatttttttaaatgttggttataattatagtgaatttattacgtggatagacgtaggatttttggttagttagggtgttgtaagtagtggtgatagttgagaatatgtagtcgtttttttttttttgggtatagtgttattttgtttagaggtgagtttttgtttgttttatagagtaggttgtagtttgttattttttttaaaagttttgtggatttttttagtttttttgtttagtttttgtattcgtttttggagaaaaaaaaattatagtgtgaatttttatacgttattttgtttttttagatgggagaggtatgttaatgttgtttttaatttgttgttttggggggaaagaaaataatttgttttgttttttttttaatggatttgttgggtttagtaatttagaggttattgggaattttggcgaaagttattttagtggagtagtaggaaggaagttagttgtagtgtttttgttgagtagtagaggggaggtgaggaagtggagagagtagttgtggtggttgaagggtgttaggatagagggagtatgataaagttataagtaagatgtggtagaagggaaagagttaggatagaggggagagaaagtaggatttttaaggattagagaggtagtgggttttatagttaggtgcggggatttaatagaaatagaaggagggacgttttttattttgatttcggaaagaaggaagaaattgcgtgcgagtttagataagttcgttggcgggggttgggatgtttgtattttttttgttaaaaaaggaagtgtaggtttaaaatatttagagatagaaggtggatagataaatttttatttttagattggtaggtttttttagaagttattagataggaagatgtgaaaatttttagtatttattttagaattattaagtggtatttgttttgggttaaagttttaggatagattttattgtttttttgtgggaatatttttttaggaggtattttggattttttttttgtaatttaggttagaagttttatcgttaaggttgttttatttttttttttttgtttaatagttttgattattatttaattttgaggtatagtgaagatatcggtggttattttaataatagtaggtaggtgatttgtttagtttgagatgttggtaatatatttttaatggaagagatttggaaattttagttttttttgaggtttttgagaattggggtgatgaagtgtagaagttt

SEQ ID NO: 2308 - DNA, 2253 bp, Artificial Sequence
  chemically treated genomic DNA (Homo sapiens)
aagtttttatattttattattttagtttttaggggttttagaggaggttgaagtttttagattttttttattagaaatatgttgttagtattttagattgaataagttatttatttgttgttattggagtggttatcgatgtttttattgtgttttaaggttgggtggtagttagagttgttagataggaaaaaaaagatgaaataattttgacgatgaaatttttgatttgggttgtaagggggaaatttaggatgttttttggggaggtatttttatagaggaataatgaggtttgttttgggattttggtttaggataggtgttatttagtgattttgggatgagtgttggggatttttatatttttttgtttgatggtttttggaggagtttattagtttgaaggtggagatttgtttatttattttttgtttttgaatgttttgaatttgtatttttttttttaataaggaagatgtaggtattttagttttcgttaacggatttgtttgaattcgtacgtagtttttttttttttttcggggttagagtgagaagcgtttttttttttgtttttgttgaattttcgtatttgattgtaggatttattgtttttttggtttttgaggattttgtttttttttttttttgttttggtttttttttttttattatattttatttatggttttattatgttttttttgttttagtattttttagttattatagttgttttttttatttttttattttttttttgttgtttaataaagatattgtaattggttttttttttattgttttattgaaataattttcgttaaggtttttaatgatttttgggttattaaatttagtaaatttattaaaaaaaaaataaaataaattgttttttttttttttaagataatagattggaggtagtattagtatgttttttttatttggaaggatagaatagcgtgtagagatttatattataatttttttttttttaggaacgaatgtaggaattgaataggaaagttgaaagaatttatagaatttttgaaagaagtggtaggttgtagtttattttgtgagataggtaaaaatttatttttaggtagaatagtattgtatttaggaaggagaaaacggttgtatatttttagttattattattgtttataatattttggttaattagaagttttgcgtttgtttacgtgataagtttattataattataattagtatttgagaaagttaatattttaagtttatttataattaaggaattttgtagagtttgtattattttttttttatttttgttagagatggtgttggtatttattgttgggagttttgaagataggtaatattattggattttttgtagatattttttagtattagtttagagtttggtaggtttattgggtggttagatttagaagagtattgtagtttggtttttaggaagttttatttttagaggaaggggaagaatattatattaagggaatattttgtggaataaaagaatttgaatggtagggtttgagttttagatttttttattggtgggaagttttttattgtagagataattgttgtgttgggtagagtgggggaaagtttgtatttttatttaataggtaggtagtttttggtattgtgaagggttttagagaagggatttttgttttttttggtacgttattgtagatagagttggggttttttttaaaggaacgtagtattgatgtatttatagatagtttttttggaataaattagggtgattgtatttttacgggaggagtattttttagatttaggtttgtatgataggtagttataatttttttttatttggaatattaatatttttatagatgaaaataattgtttgtttgatttgaatagttggaatattgggaaaggagtgaagttgggaggtggatagttttttagttggtttagtgggggatttgaggtagtttttattttttattttgataaaattttagtatatttaattgagagtttttttaggtatttttattaaggttgggatttttgtttatttgttttagttataatcggtgtttatttatttattttagttatatttggtgtttatttagggatattttttttattggtttaaagtttgaattattaatttagtaagtaaaatattggggaaaaattaaataaataaataaagagtattttacgagagaatgaggtaagttt

SEQ ID NO: 2309 - DNA, 2381 bp, Artificial Sequence
  chemically treated genomic DNA (Homo sapiens)
agatttggttattgtattttagtttgggtaatagagaaaattttatttaaaaaaaaaaaaaaaaaaaaaaaaaaaaaaaaaaaaaaaaaaataaagagagagagagagagagagaggaacggaatttggggggaggatttgtaattaggttagggatggttagtttaagatgaagttattttggagtgttacgggtaagggaaatgttggggtaaggttagaggtaggattaggtttggtttgttgttagatatgggtttagtttttagtattgtttattgatgagagatgatgttttgggtttagggttgtgttgggcgtttttttaagttttttttttcgggtatttttttaggaattcggtatgtaggtattattaaatttattatataagtgaaattggtttagagatagaaaagtttttggtttaagattatataggagtgaggggtggaggaattttttttttattgagttttggtttttttatattgaaagttttttttttttttgtagtaaggtaggtggaatcgttgtttcgttttgttggtgaatgcgtgttagattttagatatatataggttggtttgttgaaaattagagatgtttatttgcgttttattcgaggttttcgtcggcgttttttttggcgtcgtttttgtttttttagaagcgtttgtatatttttttaggtgttatttttttaattcgaatatagggagcgtattgggtacgcgggtacgtggttgtttttaggggtttggtttgggtttcgttttgggtcggggcgtacgcgcgggcgggatatttggggcgtttacgcgttttgggacgagtgtcgttggttaggttcggattgaggaaaggcgagtgagatattattcgtttggggtgtaaaatttaagggagtgaaaaaaaaaaaaaaagaaagaaattaaaattatttcgagttattaaaataaatattttaatgtagtattttttaaaaaattaataggaattttttaaagtttattatgaataaaatagtaaaatggtagagaaaggatttgtggtcgttgcgtcgggtttgtggggcgttttcgggggtttgaaattggaggagattcggggttgtagggcgcgcggatgtggggcgcgttttcggtttcggcgcgtttagggtttttcgcgcggggttcggtatagggaggcggggaggcgggcggggcggggcgggatcgggcggtattttttttttttgtaagtttttttttttttttttgggtttttttcgggcgtagagtttttttttaggttagattcgcgtcgttttttttcgcggttcgtacgggtttagttgacgggtcgcgttgtttacgggttcgagtagttttttttttcgtcgttcgttcgttattcgttagtttaggtgttcgttcgttagttagttagttcgtcggttcgcgcgtttttttgtttcggagttcgtagatcgcgatttagagcgcgcggggtcgagagtcgagagatagtttcgggcgtagcgcggagtttcgggtttcgagattttgggacggggttcgggtcgtagcggtcggggggtcggggttattatcgtaagggttttcgtttagtatttgtagttggcgaatcggcgcgcgtttttttcggggttgtttttgggtttttttcggtaggggggttgcggtcgcgggtcgcggtggaagagaaggacgcgcggtttttagcgttttttgggtggtcgtttcggagtatgatttttagcgggttagcgtcgcgcgttttgattcgaggagatttcgcgttttcgtagttatgggtatcgggggtcggcggggggcggcggtcgcgtcgttgttggtggcggtggtcgcgttgttattgggcgtcgcgggttatttgtatttcggagagggtgagtttgggggcgcgggcgtgggcggggagggcgcgatggggagaggattcgattaagtaaatcgagttcgttttgattgaaatttttagggcggggcgtggtaggacgtagtttttgtatgcgcgtagggagcggaagtttttgattttggtttttggttcgttcgggttcgttttcgcgttttgcgtgttcgatttgagttcgaggaattttgttttagtgttcgttcgtcgcgggtttttttttggagcgcgttttcgattcgtgtttcggttttttcgagtttaagtcgtttcggagatacgatacgcgttatgttttgggtcgcggtcgggaagtgggggttattggtgttggatagtttcgaatagttaagtttttcgagcgtatatgtgtagtagagttaagcgttttgagtgttttatcggtgggtgacgttgtttggggttagggattgtag

SEQ ID NO: 2310 - DNA, 2381 bp, Artificial Sequence
  chemically treated genomic DNA (Homo sapiens)
ttgtagtttttgattttaggtagcgttatttatcggtgaggtatttagggcgtttggttttattatatatatgcgttcgggggatttggttgttcggggttgtttagtattagtgatttttatttttcggtcgcgatttaaagtatgacgcgtgtcgtgttttcggagcgatttgggttcggaggggtcggggtacgggtcggaggcgcgttttagagaggagttcgcggcgggcgggtattggggtaaggtttttcgggtttaggtcgggtacgtagggcgcggaggcgagttcgggcgggttaaaggttaaggttagaggttttcgttttttacgcgtatgtaggagttacgttttgttacgtttcgttttggaggttttagttaaagcgggttcgatttgtttggtcgggttttttttttatcgcgtttttttcgtttacgttcgcgtttttagatttatttttttcggggtataggtggttcgcggcgtttagtagtagcgcggttatcgttattagtagcggcgcggtcgtcgtttttcgtcggttttcggtgtttatggttgcgggagcgcggggttttttcggattagagcgcgcggcgttggttcgttgggggttatgtttcgaggcggttatttaagaggcgttgggggtcgcgcgttttttttttttatcgcgattcgcggtcgtagtttttttgtcggggagggtttagaggtagtttcgggaagggcgcgcgtcggttcgttagttataaatattgagcggaggtttttgcggtggtggtttcgatttttcggtcgttgcggttcgggtttcgttttaggatttcggggttcggagtttcgcgttgcgttcgggattgtttttcggttttcggtttcgcgcgttttgggtcgcgatttgcgggtttcgggatagagggacgcgcggatcgacggattagttgattggcgggcgggtatttgggttggcgggtggcgggcgggcggcgggagagagggttgttcgggttcgtaaataacgcggttcgttagttgggttcgtgcgggtcgcgggaaaaggcggcgcggatttggtttaggaagggattttgcgttcgggagaggtttaggagagggagggaaagtttgtaggggagggaggtgtcgttcggtttcgtttcgtttcgttcgttttttcgtttttttgtgtcgggtttcgcgcgggaggttttgggcgcgtcgggatcgagggcgcgttttatattcgcgcgttttatagtttcgagttttttttagttttagattttcggaggcgttttataggttcgacgtagcggttatagattttttttttattattttgttattttgtttatagtgggttttggaggatttttgttgattttttaaaaaatattgtattaaaatgtttattttggtgattcgaggtggttttggttttttttttttttttttttttttatttttttaaattttgtattttaggcgagtagtgttttattcgtttttttttagttcgggtttggttagcgatattcgttttagagcgcgtgggcgttttagatgtttcgttcgcgcgtgcgtttcggtttagggcgagatttaagttaggtttttggggatagttacgtgttcgcgtgtttagtgcgttttttgtgttcgagttggagaaatgatatttggaaaaatgtgtagacgtttttgaaagggtaaagacgacgttaaagaagacgtcggcggagatttcgaatagggcgtaggtggatatttttgatttttagtagattagtttgtatgtgtttgaagtttagtacgtatttattaataaggcgggatagcggttttatttattttattgtaggagaggaaggggtttttagtataggaaagttagaatttaatgggaggagggtttttttattttttatttttgtgtggttttggattagggatttttttgtttttgggttagttttatttgtgtaatgggtttaataatatttgtatgtcgagtttttggggaggtattcgggaaagaaaatttaagaaagcgtttagtataattttagatttaaggtattattttttattaataaatagtgttaggagttggatttatgtttagtaataggttaaatttaattttgtttttggttttgttttagtattttttttgttcgtaatattttaggatggttttattttgaattggttatttttaatttaattgtaaattttttttttaagtttcgtttttttttttttttttttttttttttgtttttttttttttttttttttttttttttttttttttttttttagatggagttttttttgttgtttaggttggagtgtaatggttagattt

SEQ ID NO: 2311 - DNA, 840 bp, Artificial Sequence
  chemically treated genomic DNA (Homo sapiens)
tagtttatatagttgtagtttttaagtgttgggtacgttttaagcgttttataaatatttgtagaaatgaatgaatgacgtatgtatttgtacgtgggtttatatttgtaagaataggttgtttaggttatgaggttcggtgtattatttgtatttttttttataacgggtagtaaagtttttttcgttttgtgttattcggtaattataattttgtttatagagggcggcgtagtggggttgtttcgtcgcgagttcgttttcggggtttttacgtcgtggttttcgggtaggtatcgggtagttggagacgttagagtcggcgggtaaggtgcgggcggtgcgtcgggtcgcgggcgcgtaaggaggggcgagagggtggggaggggcggggtcggcgtttttcgttatttgataaaacgtttgcgagtttttagagaataacgggtttatttagcggtcgcgagttgttcgcgagggggagcggtcggacggagagcgcgatcgtttcgggggtggggtcgggcgtagcggcgagaggaggcgaaggtggttgcggtagtagtagcgcggtagtttcggatttagttcggagcgtagggcggtcgttgtaggttttcgttttttttttcgtgcgttcgtttatggtcgtcgtcgggtagttgtgtttgttttatttgtcggcggggtttttgtttcggttcggcgtagtttttaatttggatattcgggaggataacgtgattcggaaatatggagatttcgggagttttttcggtttttcgttggttatgtattggtaattgtagttcgaggataagcggttgtgagtttttagat

SEQ ID NO: 2312 - DNA, 840 bp, Artificial Sequence
  chemically treated genomic DNA (Homo sapiens)
gtttgggaatttatagtcgtttgttttcgggttgtagttgttagtgtatggttagcgagaagtcgaagaggttttcggggtttttatattttcggattacgttgttttttcgagtgtttaagttgaaggttgcgtcgagtcgggataggagtttcgtcgataggtagagtaagtatagttgttcggcggcggttatgggcggacgtacggggaggggagcggggatttgtagcggtcgttttgcgtttcgggttgggttcgaggttgtcgcgttgttgttatcgtagttattttcgttttttttcgtcgttgcgttcggttttattttcgggacggtcgcgtttttcgttcggtcgttttttttcgcgggtagttcgcgatcgttgaatgagttcgttgttttttggagattcgtaggcgttttattaagtgacgagggacgtcggtttcgtttttttttattttttcgtttttttttgcgcgttcgcggttcggcgtatcgttcgtattttattcgtcggttttggcgtttttagttgttcggtatttgttcggaagttacgacgtgggagtttcggaggcgagttcgcggcgaagtagttttattgcgtcgttttttgtggatagaattgtggttgtcgagtagtatagagcgagggagattttattattcgttataaagagaagtgtaggtgatgtatcgggttttatggtttgagtagtttgtttttgtagatgtgggtttacgtgtagatgtatacgttatttatttatttttataggtgtttatggagcgtttaaggcgtgtttaatatttggggattatagttgtgtagattg

SEQ ID NO: 2313 - DNA, 3120 bp, Artificial Sequence
  chemically treated genomic DNA (Homo sapiens)
ttaaaaaaaaatatatcgttaatttaaatttttaatttttagtagtttttgagtgtttttataaatttgattttatttaatttttatatattttagtgaggtagatatggttaatgtatttagtttatagaagaggagaaatagggtgaagtaatttgtttaaaattatattaagtgggagaagattaaatttggttttttaattttaaattttaggagtattttatttttcgggaaaaaaattttattttagtataaagtttatgaaatgttatataaatatgtgattattattttggggtaaggatgaataagtttaaagaagtattatgtttgacgttgagttggttggtcggtgaaggcgtttgtttttttttttggtatttttatgatttatttgttggataggtagggggaaggggagagtaatgagttttatttgtttagagtaagggtggggtaagatatattttattttttttattggttttttttttagttttattgatagagttttgtttaattaggaggaagtaattttttatttgttaatagatgtaatgttaggatgagattttaagttagagtttatttttagagtcgattggtagttttcggggttaatggtaagcggataaatagaggcggtcgtggaagaggattggaggcgaggtttcgtttttttacgggatagttaggcgagatagttagtgagttcgtattagagggtgggcgttttttttaggggcggagtttcgaggtggcgaggggcgtggtttggttgttaggttttttcgttttttgttcggttattgagttgttgttttggttagagttcggagtagtcgtcgttcgatcgcgtcgagtttagttcgttgttcgcgtcggtttttatttcggttcgatttcgattcggttcggttaggttttatatttagtagttacgatggaggtgatgaatttgatggagtagtttattaaggtgattgagtggtagtagatatatatttacgattcgggtatttattcgggcgttaatatttgcgtgtttttcgttagtagtaagggtattatggaggaggatgaggtttgcgggcgttagtatacgtttaagaaaattattatttatatttagggggtgttttttagttaaggttaggatttttggggattattgtatggggtagaaaatttgtttgggttttggagagaggttagagtgaaaggaggtagattgtagggggtttttggtttgagggaggaggtatagtttatgttaattaggggtttatttagtttgaaggaggaggtgtagttattttagggtgttgtatttgggagggttatagaatttttttttgtgaattattagtagggagggaaggtatagtttttgtttttagggtgtttttagtttgaaggaaaagttatagtttttgttttttgtgaatataagaatttgatgaagatattgggtacggtggtttatgtttgtaattttagtattttgggaggttgaggtgggtagattatttgaggttaggagtttgagattagtttggttaatatgatgaaatttcgtttttattaaaaatataaaaattagtcgggtgtggtggcgtatgtatttgtagttttagttatttgggaggttgaggtaggagaattgtttgaatttaggaggtagaggttggagtgagttgagattgcgttattgtattttagtttgggcgatagagtgagatttcgttttaaaaaatagtaaaaaaaagagtttgatgaggatgtatattatggtttttagggagtttatggatggtagggaggacgtagttttttggttgtaggagttttacgtttgtgggagagttagggtcgtagtttttaggaatttttagggatttttttttgggtagaggggtgtaggtgttaagtttgagggtttttcgttggggttggagggagattaggtttttgcggttgatttgtagataggttaaggttgtgggatgagtgattgatttagttttggggtttagttcgggatggggatgtttcgttagtttaagttttttttgtttttttgggagagaggaatagttaggttttagaattgttggttataggtgtttttagggttttgaatatgttagggggtgggttgtgggtgttgggagtagtgtgagtagattgtggttggtggggttttatggagtttagttttcgtatgttagttttttttttgatagttggtaggggtagtagggggttttttggttggtagggttaggtattgtgttggtagtaaaaagtatagtatttaggtgggaaagttatgtagttgttttttttttttcgattaattagagggtggaatttttgcgtttttttttttgggggtattaggatagttgttagggtgtggttgtttgggtatttatttgtgggatttttagatttatttaggggatggaagttagagaggaatttgacgttttagttgaggatttagtttttgttttttgaatttatagttttgattttttttttgatttgttgtgagatgtgatgttggtggttttttgggtttttgtttgtttgtttgtatagtgggaggattgttatcgttggggatgatgagggtgtaattagatttttgagattttagggttgaaaatagatttgatgggtaagggaggagaatagagtaggggtttgggtttttgagttaggttgttttataatttttttgtgtttagtttttttatttgtaaagtggagttagtgatagtatttattttgtagggtcgttgttaggttatgtgagaaaatataagtagggtattgaatttattgttaggtatataataagtgtgttaaaaaaaaaaaaaaaattttcgtgatagatagaatatgtggggtttattttatagagattattgaggtgatggtgatttttttaaggtttttggtgagaggtagaatggttagttatgtgttgggggtttgggtagggtaagaggtagtttagaggatttaggtggggttgtttgtggtttgttttgttttttagtgtttgtttagtttattgtttgtatttagtttttgtttttatggttt

SEQ ID NO: 2314 - DNA, 3120 bp, Artificial Sequence
  chemically treated genomic DNA (Homo sapiens)
gggttatggggatagggattgagtgtaggtagtgggttgggtagatattggggagtagggtaggttatagatagttttatttgggttttttgggttattttttgttttgtttaaatttttagtatatgattggttattttattttttattaggaattttggggaagttattattattttagtaatttttgtaaaataggttttatatgttttgtttattacgggaattttttttttttttttggtatatttattatgtgtttggtagtgaatttaatgttttgtttatatttttttatataatttgataacgattttgtaaggtaagtattattattggttttattttatagatgggaaaattgggtatagaggggttataaggtagtttgatttaggggtttaaatttttattttattttttttttttatttattaggtttgtttttaattttgaaattttaggagtttaattatatttttattatttttaacggtagtaatttttttattatataggtaggtaaatagaggtttagagaattattaatattatattttatagtagattagagggaaagttagggttgtgggtttagagagtaggagttgggtttttagttgagacgttaggtttttttttagtttttattttttgggtgggtttgggagttttataggtaggtgtttaagtagttatattttggtaattgttttgatgtttttagggagagggacgtagaggttttattttttaattagtcgagaaggaggagatagttgtatggtttttttatttggatgttgtattttttgttattaatatagtgtttggttttgttagttaaaaggttttttgttatttttattagttgttagggaggagattggtatgcgagggttgagttttatagagttttattagttatagtttatttatattatttttagtatttatagtttattttttggtatgtttagggttttggaggtatttgtggttaatagttttagggtttggttattttttttttttagaggggtaggggaggtttgggttggcggggtatttttatttcggattaagttttagagttgagttagttatttattttatagttttggtttatttgtaggttagtcgtagaggtttggtttttttttaattttaacgaggggtttttaggtttgatatttatatttttttatttaaaggggaatttttgggggtttttgggggttacggttttggtttttttataaacgtgaggtttttgtagttaaagggttgcgttttttttgttatttatgggttttttgagagttatagtatatatttttattagatttttttttttattattttttgagacggagttttattttgtcgtttaggttggagtgtagtggcgtaattttagtttattttaatttttgttttttgggtttaagtaatttttttgttttagttttttaagtagttgggattataggtgtatgcgttattatattcggttaatttttgtatttttagtagagacggggttttattatgttggttaggttggttttaaatttttgattttaggtgatttgtttattttagttttttaaagtgttgggattataggtatgagttatcgtatttaatgtttttattagatttttatgtttatagaaggtaaggattatggttttttttttagattggaggtattttaagggtagggattatgttttttttttttattgatggtttatagaagaggattttgtgatttttttagatgtagtattttgaagtagttgtatttttttttttagattgggtgggtttttagttagtatgagttgtgtttttttttttagattagagattttttataatttgtttttttttattttgatttttttttaggatttaggtaggttttttgttttatgtaatagtttttaggggttttgattttggttggggggtattttttgggtgtaagtggtggtttttttgagcgtgtattggcgttcgtaggttttatttttttttatgatgtttttgttgttgacggagggtacgtaggtgttggcgttcgagtggatattcgagtcgtaggtgtatgtttgttgttatttagttattttgataggttgttttattaggtttattatttttatcgtggttattgagtatggggtttgatcgggtcgggtcggggtcgggtcggggtgggagtcggcgcggatagcgaattgagttcggcgcggtcgggcggcggttgtttcggattttggttaaggtagtaatttagtaatcgaataaaaggcgaagagatttgatagttaagttacgtttttcgttatttcgaagtttcgtttttgggggagacgtttattttttggtgcgagtttattggttatttcgtttgattgtttcgtggaggggcggagtttcgtttttagtttttttttacggtcgtttttgtttattcgtttgttattggtttcggggattgttagtcggttttagggatggattttaatttgaggttttattttaatattgtatttattggtagatagaaagttatttttttttgattggataaggttttgttagtaagattaaggaaaaaattaatggaagggatggggtgtgttttgttttatttttgttttgagtaggtgagatttattattttttttttttttttatttgtttaataggtaagttatagggatattaagggaagggatagacgtttttatcggttagttaatttagcgttaggtatgatgtttttttgggtttatttatttttgttttaaagtagtaattatatatttgtatagtattttataggttttgtgttggggtgggatttttttttcgaaagatggagtatttttgggatttagaattagaaggttaggtttggtttttttttatttggtatgattttaggtaagttattttattttgtttttttttttttgtaaattggatatattagttatatttattttattggagtatgtggggattaaatgaggttaggtttgtgaaagtatttagaaattgttaaaggttagaaatttaaattaacggtatgtttttttttaa

SEQ ID NO: 2315 - DNA, 718 bp, Artificial Sequence
  chemically treated genomic DNA (Homo sapiens)
tttgagggtggcggggtgtttttcgtagtttttttgtggagatcggttagcggggcggcgtggtcgttcgcggcgtttttttgtggtattcgtatagttcgtcgcggttcggtttcgtttcgggttagaattggcggttgcggggatagttttgcggttaggtagggggcgggtcgtcgcgtgggttcggtagttttttttttcgttaaggcgtcgtttagattcgttttttagtcggttcggttcgttattttagatcgttttagttattttttttttcgtcggttcggttttcgtttttttttcgtcggttcggttcggtttttttttttttttcgtcggcgttcgttgttttttttttttttttttttttatatcgtttttagtcgttttttttcgtacgttcgtttgaagaagaatcgagcgcggaacgtatcgatagttttgttttttgcggtcgttcggtttcgaatttatcggtgtgttcggagttcgatttttttaggcggcggtcgcggcggcggaggtagtagcggcggcggtagtggcggcggcgaaggtggcggcggttcggttagtattttcggttttcgttatttcggattgggagcgagcgcggcgtaggtattgaaggcggcggcggggttagaggtttagcggtttttaggtgcgggagagaggtacggagcggattattttttttgggtttttgttcggg

SEQ ID NO: 2316 - DNA, 718 bp, Artificial Sequence
  chemically treated genomic DNA (Homo sapiens)
ttcgggtaggggtttaggaggggtggttcgtttcgtatttttttttcgtatttgggagtcgttgagtttttggtttcgtcgtcgtttttagtgtttgcgtcgcgttcgtttttagttcgaaatggcgggggtcgggagtattggtcgagtcgtcgttattttcgtcgtcgttattgtcgtcgtcgttgttgttttcgtcgtcgcggtcgtcgtttaggaaaatcgagtttcgagtatatcgatgagttcggggtcgggcggtcgtagagggtagagttatcgatgcgtttcgcgttcgatttttttttagacgggcgtacgagagggagcggttgagggcggtgtgggaagagggaagagggggaggtagcgagcgtcggcggggagaaggagggggtcgggtcgggtcggcgggggaggagcgggggtcgggtcggcggaggaaggggtggttggggcggtttagggtggcgagtcgggtcggttggagagcgggtttgggcggcgttttggcgggaggagggattgtcggatttacgcggcggttcgttttttgtttagtcgtaaggttgttttcgtagtcgttaattttgattcggagcgggatcggatcgcggcgggttgtgcggatgttatagggagacgtcgcgagcggttacgtcgtttcgttgatcggtttttatagagaagttgcgaagagtatttcgttatttttagg

SEQ ID NO: 2317 - DNA, 2042 bp, Artificial Sequence
  chemically treated genomic DNA (Homo sapiens)
ttagaatttatataatttcgagttttttaaaggtaagtcgaggaatataaataatatagtggaagaatttcgtagtgggtcgtgcgtatttaagggaaaaatttattttatttttagtttttttatttttttttttgtttcggtaaaacgattggttatattttaaattagcggtaggaaatcgttttacgaaatttatttggttgttgcgattaggtttttttgattttttagggatcgtgtcggttttatgaacgtttcgggatttttgttcgggaggggttggagcggggtttcggtagtagcgggcgttttcggttcggatttatatttggtcgggcggggatttttttgtcgtagtttaaattggcgcgaggttttagggacgatttcgagcgattttttgattcggtatcgtttttttaaggcgttttttttcgatttttttcgtaattcggagttttttaggtcgcggagtttaaggattttagcgattttcgcgcggggagcgggtatgagaggtcgtttttttttttcggtatgtattatttaagtcgaattttttttttttttttttttttttttttttttttttttttttttttttttttttttaattttttttttcggtttttcgtttatttcgcgcgttttttttttcgggtcggagtcgcgggttcgagcgcgagacgtcgttgttttcgttttcgtcgttttttggagtcgtcggggcggacgcgtagtttatggggcgcggtgggtacggggagttgttttaggggtcgcgggagttgttgagaggagatagggtgtgggttttttttttcgtttagattttattttatttgtcgattttattttttgttttttttttttcgggggcgcgtattcgggtacgcgttcggaagtcgggggtcggcgcggagtgtaggttgttttcggggtaggtgagggaagcgcggaggcggggcgcgggggtagtggtcggcgagtagcgcggttttcgttaggggcgtttattcgttagttttttcggcgcgagtcgtcgttatcgttcgcgtcggagttaggtttttgggtttttaggtttaagtagcgaagcggttttcgggggacgtcgttaggcgagaggaacgcgtcggtgtttttgttttcgtcgtgatttagcgtgcgggcggcgggatgagagggagttatcgggtcgcgtcggttttgcggtttcgggggcggttttggttcgtgttggtcgtgttggcggcggtcgtcgcggcgggttgtgtttaggtagttatggacgagtgtacggacgagggcgggcggtcgtagcgttgtatgttcgagttcgttaacgtcgtttttaacgtgattgtggtggttattaatacgtgtgggatttcgttcgaggaatattgtgtgtagatcggggtgatcggggttattaagttttgttatttgtgcgacgtcgggtagttttatttgtagtacggggtagtttttttgatcgattataataattaggtcgatattatttggtggtaaagttagattatgttggtcggggtgtagtattttagttttattaattttacgttgtatttgggtaagcggtgatagtttcgtttttgttattgttcgttagtagtttagttttcggatcggtttcgttttagtggtcggttttacgggcgaagacggtcgcgtgtttgttttttgtttttcggtatgggttatatagaaatttttttttttaattttttaaatagatatcgtttttaatatttcgtgagggttaggatgtttcgtacgagtttttttgtttttttgttttttttgatttaacgggattttggttttttgattattttgtatttcggttgttaggattgtgattttttttttttttttttgaagcgttaattagaaatttttatttttatttttttttttgttagtaaggttattatagcgtatttttggatcggaaataagaaggttcgttttaaatattttcgtttttaaaatgtttagatgtttttttaggg

SEQ ID NO: 2318 - DNA, 2042 bp, Artificial Sequence
  chemically treated genomic DNA (Homo sapiens)
ttttggaaggatatttaaatattttaaaggcgaaagtgtttaaggcggatttttttgttttcgatttaagaatgcgttgtgatgattttgttagtaaagagaaaagtggggatgggagtttttgattaacgttttagaaaaaaaagggggaaattataattttaatagtcgaaatgtagaataattagagagttagaatttcgttaagttagaaagaataggaaagtagagagattcgtgcggaatattttggtttttacgggatgttaaaagcggtatttatttaagaagttggagaaaggagtttttgtgtggtttatgtcggggaatagagagtaaatacgcggtcgttttcgttcgtgaggtcggttattgggacggagtcggttcgggagttgggttgttggcgagtagtagtagggacggggttgttatcgtttatttaggtgtagcgtgaggttgatggagttggggtattgtatttcggttagtatggtttggttttgttattaggtggtgtcggtttggttgttgtagtcggttaggaaggttgtttcgtgttgtaggtggggttgttcggcgtcgtataggtgataggatttggtgatttcggttatttcggtttgtatatagtatttttcgggcggagttttatacgtgttggtggttattatagttacgttgaaagcggcgttgacgaattcgggtatgtagcgttgcggtcgttcgttttcgttcgtgtattcgtttatggttgtttgggtatagttcgtcgcggcggtcgtcgttagtacggttagtacgggttagagtcgttttcggggtcgtagggtcggcgcggttcgatggtttttttttatttcgtcgttcgtacgttgggttacggcgaaggtaagggtatcggcgcgtttttttcgtttagcggcgtttttcggaggtcgtttcgttgtttgagtttgggggtttaggggtttgatttcggcgcgggcggtggcggcggttcgcgtcggagagattgacgggtgggcgtttttagcgaggatcgcgttgttcgtcgattattgttttcgcgtttcgttttcgcgttttttttatttatttcgggagtagtttgtatttcgcgtcgattttcgattttcgagcgcgtgttcgagtgcgcgttttcggggaggaaggagtagggggtggggtcggtaggtggggtggggtttgggcgaggagaaagatttatattttgtttttttttagtaattttcgcggtttttggggtaatttttcgtgtttatcgcgttttatggattgcgcgttcgtttcggcgattttaggaggcggcgggggcgggagtagcggcgtttcgcgttcgggttcgcggtttcgattcggggggaggggcgcgcgaggtgggcggggagtcgggggagggggttgggggaggggaggggagaggaggggaggggaggggagaggagaggaggggaggggattcggtttgggtggtgtatgtcgggagggaagggcggttttttatattcgtttttcgcgcgggggtcgttggggtttttgggtttcgcggtttgggagatttcggattgcgggaggagtcgggggagggcgttttagaggggcgatgtcgggttaggaggtcgttcggggtcgtttttggggtttcgcgttaatttgggttgcggtaagagggttttcgttcggttaggtgtgggttcgaatcgggagcgttcgttgttgtcggggtttcgttttagtttttttcgaatagaggtttcggggcgtttatggggtcgatacggtttttggagaattagaagggtttggtcgtagtagttagatgagtttcgtgaagcgattttttgtcgttgatttaaagtgtaattagtcgttttatcggggtaaggaaggaagtgaaaaggttgggaatggaatgaattttttttttgggtacgtacgatttattgcgaaatttttttattgtgttgtttgtgtttttcggtttgtttttaaaagattcgaaattatgtggattttga

SEQ ID NO: 2319 - DNA, 2854 bp, Artificial Sequence
  chemically treated genomic DNA (Homo sapiens)
tcggaattttgtgaattttattttgttattaaaatgtaattagtaatttttgtgggttatgttggtttgaagttttttgataaagtagttataagtatagttaatgaaataaagttttttggatttaaaaatatttatttataatgagtattaatgaataagataggtaaattttattgtaataaatttttgtgattataataaatgaattaatatgattttattataatagttatattgtaagaattgatgtgataattaagatttaattgaaattaatttagatagtaaaattttatgaaaatttattatagttgttagtttttttttaaacgaataattttaattttttataaataggattttatttttaatttaagataagttataagaagttaatatatataatttaattttttttattagtaattttgtaggagttgtttagaaagtttttgtatttttagagttagaagagttttagggatagtgaattttaatttttttttttatagatgaagagattgaagggtaaattttatgattgatagtagaaatagaaggaaaattttagtgttttgattgtttagtttttttattggagtatagaattaaatgatttttttggaatatttattgtttttaaagatttaggggtgggtgggagtaaattttttttatatataataggtatattatagggttaaaaaaagaaaaaagttatataaaatatgagatttgaaagaaaagttatttaggtattttgagttatttattttttttttttttttatttaagatatatggtgaaaatttttaaaaattttagtgtttattttaatttttttattaaaatttgataaaattaaaagagaatagagaatatgatatttaaagtcgttatgtataattattttatatatatttagatagatttagcgtggttgagaataaagtaagtgagggtattaagttttttttagatagtttattgagtatttattataaatttgggttttatttatttattttattatttaatagatatatatggaatatttattaggagttagaagttatgatatgttttgttgatattaagatgaatagagaggggaaagtaaaattaaatttataattatagtgtgttagattatttgttgtagaattaggtgttatggttataattatttaattaggatgatttagagaagaattaaagtggaaatgatattgggttgagttttgaaggataattgggagtttatttaatggaataatggaaaaagaagagaaaatagtggggatagtttatgtagaggtattaaagggtgaggagttatttataagtagttgaagagaggatttagagaagataatattatagatatgagtattgtttttgtgttatttagtataatgtgttaaagttaaataagtttttaaaataataataatttattttttttgagtaatagattgtagaatggtgaatgaaggagtttatttttgagaattggttttagagtgaaagaaatttatttttatattttttttttttaaagttttaaatgtttttttagtttttaaagtttattttttttagtaaaattgttaggatttttagaatttaaatagaatttttggaaggaagaaatgattaaattaaagaagggatattatggatttttatgattattataaaattttgttttttaagttttttggtatgtagattatagtagttttttgtattggtgagaggtggtaggtgatagatatgagttttaggttttattattttaaaatcgtgtgattttagggaagttatatattttttgggatattttttttatcgtaaatattttgttagtttaatgtggagtttaaatatgatgtgaggtagagtatttgttataaggtttagtttattttgggttttttatggggtagttgttattagtattaggtagttttatttatttatttaataaatttttattgaggatttattatgtagaagttagaaggaatataaaaataaatttgaattggattttgtttttaaggattttttaatttatagaagagatataggattaagttaaatagttatattataaataagaaagtatttattattaagagaaattattggggtagttgggaggatgggtaaagattatttgtagagtggagggatttggtgaaagagaaggggaaaggattaggggttgaggataaaagagaggaaaaatgtttgagttaggtatttttacgttttttgatgtgggtatagcgagtatttatcggatttttttataaatgaaataaaaggggtttcgggaagcgttataatttatttaatttagaattttttatttttaatttaaaatatttgttattaaatttttttattttttatagttagggttatttgtagatggtaggggataagataggggaaagtagtaggaaggaggttattgggttattgggtattgtcgtaggttaaggtagagtagatttagcggggtgcgcggtaagagggggagggtaggggcgggtcggtagggaagggtgtgtggaagggtagttaaggggcggggagaggggtgcgggtcgtatttagaggtcgtttaagatattggtaagtcgtagaagtttagttcgtcggttatgaagtagcggttttcggcgttgtagttgttgaagttgttgttgttgttgtagtcgtcgttgttacgagcgttgcgcgaggcgttttgttttgagttttgtaattgcgtgttcgacggcgttttgcgttgtttcggttttacggtcggttttattcgattgtgagtatatagcgt

SEQ ID NO: 2320 - DNA, 2854 bp, Artificial Sequence
  chemically treated genomic DNA (Homo sapiens)
gcgttgtgtatttatagtcgagtgagatcggtcgtggggtcggggtagcgtagggcgtcgtcgggtacgtagttgtagggtttagggtagagcgtttcgcgtagcgttcgtggtagcggcggttgtagtagtagtagtagttttagtagttgtagcgtcgagaatcgttgttttatggtcggcgaattgggtttttgcggtttgttagtgttttggacggtttttgagtgcggttcgtattttttttttcgttttttggttgtttttttatatatttttttttgtcggttcgtttttgtttttttttttttatcgcgtatttcgttgagtttgttttgttttgatttgcgatagtgtttagtgatttaataattttttttttgttatttttttttgttttgttttttattatttgtaaatggttttagttataggaggtaaagagatttaatggtaaatgttttggattagaggtggggagttttgaattgagtgagttgtgacgtttttcggaattttttttattttatttgtgaaagggttcgatggatattcgttatatttatattagaaggcgtaagagtgtttggtttagatatttttttttttttttatttttaatttttaatttttttttttttttttttattaaatttttttattttataagtaatttttgtttatttttttaattattttagtaattttttttggtggtaaatgtttttttatttatggtatagttatttggtttggttttgtattttttttatagattgggaggtttttgagagtaaaatttaatttagatttatttttgtattttttttggtttttatatggtaagtttttagtaaagatttgttgaatgaatgaatgaaattgtttaatattggtagtagttgttttatagaaggtttaggataggttagattttgtaataggtgttttgttttatattatgtttaagttttatattgaattagtagggtgtttgcgatgagaaaaatgttttaagaggtatgtggtttttttgaagttatacggttttaaagtagtgaaatttggaatttatgtttattatttattattttttattaatgtaaaaagttgttatgatttatatattaaagaatttaggagataaaattttatggtaattatggggatttataatattttttttttgatttgattattttttttttttaaggattttgtttggattttggaaattttagtagttttgttggaagaggtggattttgaaagttgggaaggtatttaaggttttaaagagaggaaatataagaatagattttttttattttgaagttagtttttaaggatgggtttttttatttattattttatagtttgttgtttaaggagggtagattattattattttaaaaatttgtttggttttggtatattgtgttagatggtataaaaataatgtttatgtttataatattgttttttttggattttttttttaattgtttatagatgattttttattttttaatatttttgtatgggttgtttttattatttttttttttttttttattattttattagataaatttttagttgttttttaagatttagtttaatgttatttttattttgatttttttttgagttattttagttgagtagttgtggttataatatttggttttatagtaggtaatttaatatattgtaattgtgggtttaattttgtttttttttttttatttattttaatattaatagagtatgttatagtttttagtttttagtaggtgttttatatgtgtttgttgaataatagagtgaataagtgaggtttagatttgtagtagatgtttagtaaattatttgagaagagtttgatatttttatttgttttatttttaattacgttggatttatttggatatgtataaagtaattatatatgacgattttgggtgttatgttttttgtttttttttagttttgttagattttggtagggaagttggggtaggtattgggatttttaaaagtttttattatgtattttgaatggaaggagagaaagaatgaataatttaaggtgtttgaatggttttttttttaagttttatgttttatgtgatttttttttttttttaattttgtagtgtatttgttatatataaaaaaagtttgtttttatttatttttgaatttttgaaaataatggatattttagaagaattatttaattttgtattttagtaggaggattaggtaattagaatattaggattttttttttgtttttgttgttaattatgagatttgttttttagtttttttatttgtaagaagaagggttgaagtttattatttttaaggtttttttggttttaaagatgtaaggattttttaagtagtttttatagaattgttagtgggaggaattggattgtgtatattgattttttataatttgttttggattggaaataaaattttgtttatgaggagttgaggttgttcgtttggaagaaagttaataattgtaatgagtttttataaaattttattatttagattaattttagttggattttaattattatattagtttttgtaatgtaattattataataaaattatattgatttatttgttataattataaaagtttgttataatggaatttatttattttatttattaatatttattatgagtgagtatttttaaatttaaaggattttgttttattaattatgtttatagttattttgttagagaattttaaattaatatgatttataaagattgttgattatattttaatgataaaataaagtttatagaatttcga

SEQ ID NO: 2321 - DNA, 505 bp, Artificial Sequence
  chemically treated genomic DNA (Homo sapiens)
ttgtagaaggtggtagatattggtagttggtattagtgcggttttattgtgattattatttttgaacgttagattgttgaaggtttttttaatagattttttgtgtaattttttgtttttattaaatttagtttatagtaaggaagtgaaattaattttagaggtgtagggagggtttaagggagtgtggtaaaattagagggtgtttagaaatagaaatttgatcgtttggggttattttgtagggagagtttttttgatgattttttatttgtttttttgtatgttggtttagtttggcgggtttttaattggtgattggttagtgatgaggttagtgatgaggttgtgtgtttttgagttgggtattcgaaggtatttttggggaagttgagggtacgaggaggggttgttagatttcgggagttgttgtttggttgggatttttatataatgcgttgtttggttttacgttttgttgggttttatttgttagagttttaag

SEQ ID NO: 2322 - DNA, 505 bp, Artificial Sequence
  chemically treated genomic DNA (Homo sapiens)
tttggggttttgataggtaggatttagtagggcgtggagttaggtaacgtattgtgtaggaattttagttaggtagtagttttcggagtttggtagttttttttcgtgtttttagtttttttaaggatgttttcggatgtttagtttagaagtatatagttttattattagttttattattaattagttattagttgggagttcgttaagttaagttaatatgtaaagaaataagtgagggattattaaaaaaattttttttgtaaggtggttttaagcggttagatttttgtttttgaatattttttaattttattatatttttttaagttttttttatatttttgaaattaattttatttttttattgtggattgaatttggtgaagatagaaagttgtatagaaagtttgttgggggaatttttaatagtttgacgtttagaaatgatgattataatggaatcgtattggtgttagttgttaatatttgttattttttgtag

SEQ ID NO: 2323 - DNA, 2437 bp, Artificial Sequence
  chemically treated genomic DNA (Homo sapiens)
gatatttattaatgtataatcgtgtgtttttaaaaatttttaattttaatttttaatatgttaaatattgatagatataatttatgtaaatataataaatttaaagagtgtaaaaggattttaagataaaaatgtttgagaattgttgttttagatattgtgttaaggtcgttagaaatatgattttatttaatgtagaaaatatatatatgaggtaagttttattgttatttttatttaatatgttaggagatgagggtttggagaagttaatgaattgtagaaggtatacgggttgttaagttgtaaagatagaatttgaatttaggttttaaagttaagaattttattgtttgtgttgttaggtatattgttttttaaagaartattaggaaatgtttggatttggattaattttttagaagagaaatttttttttataattaggttatttttaagggaatgtaaatatgaagattatttttatagatagtgtaaaatagagattattttttagtagtttgtgggtcgaggtttgtattttgtgaaatataaaatagttgagtatcggatttttaaatttggaggattttatttaaaaaagaagtttggattgttagttatttttgaaaaatttggagattttgagttaggttggatttatatttttatatggttataattagttgtagtttttatttgttgtttttgttagatagatgtgtgttttttggtttgttatagattttattattttttattatttttttcgtagtttatgttttttatttatgttgtttgtttgaggtatttgggttagaaatagttggagatgttttgtttattgtatagtgtttataggttatttgtttttaatttacgtgaaaaataaaaagttattaatagtaaaagagttaaatatattttattttgtttatttaaatttggatgttaataaagattttattgatagtgttatatagaaagtaaattgsttttttttttattaaagtataatattttggatttattaaaggaattaggatttgttagtgaattaatatttatttttaaatagaattttttttttttttaagtgtaatagtgaaataagtatattttatttattgtttttattttatgtttattttagtaatgtttattgttattattattatgtttggattttttataaaaaaaaaatttttgtgaatttttgtgtatatattaaattagttatttgaaataatatgagattgttaatttaacggattgtattattttgggtatttagataatattattgaattttaaatttttagtttaatataatatttgttagtagtagatattaagtatttattataatttataagtatatatttgtttgttttttttttttttttgttttattttagaatataagttttataaagttggaaattatatttgtttgtttataatgtatattttatgttttgtatagtgtttagtatttaatagttaataatgaatgaataaaggaataaatatgttaaatatattagtgttgtatatgataatttatttttttgtaattttaagaataatatgtaaaaatttttagtaaaaatgtttatgttttttttatttgagaattaaataggggagatatttattttttattatttatataaatatatatttatttttgtgtgtgttatgttttatttaggatagtgttcggtttttttgatgtgaggttaataggtaggttatatatttatgtagttaagaataaggtgtatattaagattaggatgtaagaagaggttgttgaatttgaatatttagtatagagtttttttttttttatattaaaagatagttattttgtagtcggaagtggtagttattcggttattggaaaagttttatgtaatagtagtttttagatgatgttttttttaaaggggtattttgttattaatttattgttgaaagagaaatattattgtttattaatattattggaattaaagatgaatagtgaattggttttgatttgatagtgagtttgattttgatagttcgttatttaaaaaggtttttttatatttatgaaaaaaagtatgacgttaagttagggggaaaaattgatattaatatttaagattaaattcgtagggtttttaaaaaaaaggtttttatgtgaacgtttttttttatatgtataattaattagtttaggttattataagtagggtttttgtgttaaagttttcggtggtgtatcgggatattttgtttatagtattttttttttgttagtttatttttaaattggaattatagaaagtagagggagggataagtttacgttttttattggattggtgttatttaaaatattgttatgttggaaatgttggaaatgttagaatataattattattag

SEQ ID NO: 2324 - DNA, 2437 bp, Artificial Sequence
  chemically treated genomic DNA (Homo sapiens)
ttgatagtgattatattttagtatttttagtatttttagtataataatgttttaggtggtattaatttagtgagagacgtagatttatttttttttttattttttataattttaatttgaagatggattggtaaagagaaggtattataaataaggtatttcgatatattatcggaaattttagtatagaagttttgtttataataatttaagttaattagttatgtatgtaaaaaaaaacgtttatataagggttttttttttggaagttttacgagtttggttttaaatgttgatattaatttttttttttggtttgacgttatgtttttttttataaatataaaagaatttttttaagtgacgagttattaaagttaaatttattgttagattaaggttaatttattatttatttttagttttagtagtattaatagataatggtattttttttttagtaataggttaatagtagaatgtttttttggaggagatattatttaaaagttattattatatgagatttttttaatggtcgaataattgttattttcgattgtaggatgattattttttagtatagaagagaagagattttgtgttgaatgtttaagtttaatagtttttttttgtattttggttttaatatgtattttatttttagttatatagatgtgtaatttgtttattgattttatattaggaagatcgggtattattttaaatagaatatagtatatatagaagtggatatatatttatgtggataataagaaataaatattttttttatttaatttttaaatgaaaaaagtatgagtatttttgttgagaatttttatatattatttttaagattatagaagaatgagttattatatataatattgatatatttaatatatttatttttttatttatttattattgattgttaagtgttaaatattgtataaagtatagaatatatattgtgaataaatagatatagtttttagttttatgaaatttatattttggggtgaggtaaaaaaagaaaagaggtaagtaaatatatatttataaattatgataaatgtttaatatttattgttgataaatgttatgttaagttaaaaatttgaagtttaataatgttgtttaaatgtttaggataatgtagttcgttaggttgataattttatattgttttaaatgattgatttaatatgtatatagaggtttatagagattttttttttataaagggtttagatatgataatgatgatagtagatattattaaaataaatataaaatgagggtaatgagtagaatgtgtttattttattattatatttaaaaagaaaagagattttgtttaaaaataaatgttaatttattggtagattttaatttttttaatgaatttagaatattatgttttagtaaagaaagaastaatttgttttttatgtggtattgttagtgaggtttttattaatatttaggtttgggtaagtagaatgggatatatttggtttttttattgttaataattttttattttttacgtaagttgaaagtagatggtttataaatattatgtagtagatagaatatttttagttgtttttaatttaaatattttaaataggtaatataaatgaggaatatgagttacgaggaaggtaataaggagtagtgaggtttgtggtaaattagaggatatatatttatttagtaggaatagtagataaaaattgtagttgattgtggttatgtgggaatatgagtttagtttagtttaaaatttttaaattttttaagggtagttggtaatttaaattttttttttaagtaaaattttttaggtttaaagattcgatgtttaattgttttgtgttttatagagtataagtttcggtttataaattattagaaaataatttttattttatattgtttataaggataatttttatatttatatttttttggagatagtttagttatgggaagaagttttttttttgagaaattagtttaaatttaggtattttttggtgyttttttgaaagataatgtgtttgataatatagatagtggagtttttaattttgaaatttgggtttagattttatttttgtaatttaataattcgtgtattttttgtaatttattaatttttttaggtttttattttttagtatattgaatgggaatgatagtagagtttgttttatatgtgtgttttttgtattaaatgagattatgtttttaacggttttagtataatatttaaaatagtaatttttaaatatttttgttttaggatttttttatattttttaaatttattgtgtttatatggattatatttattaatatttagtatattagaaattaaaattgagaatttttgaaaatatacgattatatattagtagatatt

SEQ ID NO: 2325 - DNA, 1563 bp, Artificial Sequence
  chemically treated genomic DNA (Homo sapiens)
aagttttttattttattgattatgaatttgagggtaaaagatttttgtttttattataatattgagtattagatttttatttttttgttatagaagtgtatttttaggatttttggagttttttatttgatttaatttttgtttatttttttttatttttttttttgttttttttttttttttttttcgtattatttttgtttttttttattggttaaatgtaatttttggattttagatttcgttgatagtttagttttttgttttttatattttttttgtttttgttgtgttttttttttagatttgtttagtttttaatttatttgttttttttttttacggttagttttattttgtttttttttttttttatatatttttattttttgttttgagtttagtaagtttttaaaggagattataattttttaagaattgtttttttttttagtgtagaggtggaattaaattttagagttttaatttttaatttttttttttataataattttatttaatttgatttgtttttttttagattttacggttttgtatttttttttttttagcgagttttaattaaaggtgtagttatattataaatgataataaaggaattatttttgtttttttataaaggttggagttatagattcggtatggttgtggggtttgttgttggtagttgggttatagtttggattttttagtagtagagggagggatatagatagttgtttatagggtttagaagataattttttattagtaaattggtttttttttttttgtaggttttatgggtatggaagaagattttattattattttatattttgagtttttcgttgtttttagttatatagtttttaataatttttattttgaggtgagataaatgttgaatattagaggaattaagttatttagaatatgtttatagggataaagttttttatatttcgttttttggatttttttatagttttttgttgtttatcgcggttttaatttttgtagatggtagtttgtattataaaaaggtaatttagaggtgttttttttttttttttttttattttttggttgtaattggatttaggttaaaataattacgtttttaattaggaaaggagggtattggggcggggacggaggagaggttgtgggagaagggagggattagaggagagagcgagagagggaattagattttagttcgtcgattaagtagaagaaagattaaaaatcggaaaagaggagaagagtaaataggtattttgaggaataattttttttaattttaagtcgatagcggtttaggaatttaagtttagtgtttatcgaagataaaggcgtttcgagggagtggcggtgcgattttagggcgtgggttcggtcgcggagtttatattgttcggttgattcggtggtttcggattatgtttttcgttttaagattttttcgttgttttttgttttttttgtttacgttcggtatcgcgttcgtttttttcggttcggtttaaagtagtagttttagtttcgaagtaagtgagt

SEQ ID NO: 2326 - DNA, 1563 bp, Artificial Sequence
  chemically treated genomic DNA (Homo sapiens)
gtttatttatttcggggttgaagttgttgttttgggtcgagtcgagggaggcgagcgcggtgtcgagcgtgagtagggggagtaggagataacgggagggttttggggcgggagatatggttcgagattatcgggttagtcgggtagtgtgggtttcgcggtcgggtttacgttttggggtcgtatcgttattttttcggggcgtttttgttttcggtaggtattgaatttgaatttttagatcgttgtcggtttggagttaaaggggattgttttttaaagtgtttgtttgttttttttttttttttcggtttttgattttttttttgtttagtcggcgaattggggtttggttttttttttcgtttttttttttggtttttttttttttttatagtttttttttcgttttcgttttagtgttttttttttttggttggggacgtggttgttttagtttgaatttaattataattaagaaatggaaggaaaaaaaaaaaaaatatttttaagttgtttttttgtggtgtaggttgttatttgtaggggttgaggtcgcgatggatagtagggggttgtagggggatttaggggacgggatgtgggagattttgtttttataagtatattttgagtggtttgatttttttggtatttagtatttgttttattttagggtgggaattattgggggttatgtggttaggggtaacgaggagtttagagtgtgggatggtggtggggtttttttttatgtttatgagatttgtagagggagaagggttagtttattaatagggggttattttttgggttttgtagataattgtttatgtttttttttttgttgttaaaaaatttaaattataatttaattattaataataaattttataattatatcggatttgtggttttaatttttgtagaaagataaaggtgatttttttattgttatttgtaatgtggttgtatttttaattggaattcgttgggaggaaaagggtataaggtcgtgggatttgggggaaagtaaattaagttgggtgaaattattgtaaaagaagggattgggagttgggattttggggtttagttttatttttatattgaaaaaggaggtaatttttaaagagttataattttttttagggatttattggatttagaataaaaggtggaggtatgtagggaagggagagggtaggataaagttgatcgtgagaaagggagatagatgagttgggaattagataggtttggaaaagaagtataatagaagtaggaaaagtgtgggagatagaaaattagattattagcgaaatttaagatttaagaattgtatttggttagtgagagaggatagaggtagtgcgaggaggaagggagaagaaagtaaaggaaggaatagaggagggtggatagaaattaggttaggtaggaagttttagaaattttagggatgtatttttgtggtagaagaatagaagtttagtgtttagtattgtaatgaaaataaaggttttttgtttttagatttatgattaataaaatgaaaagttt

SEQ ID NO: 2327 - DNA, 2384 bp, Artificial Sequence
  chemically treated genomic DNA (Homo sapiens)
ggtatttgtaattttagttattcgggaggttgaggtagaagaatcgtttgaattattgtatattagtttgggtaatagagtaagataacgttttaaaaaaaaaaaaaaaaaaggttggggataatgttggttttttttttttgttttttttttttattttaggggtttttttgtgtgtattttttaattttagtgggggaggagaaagagtttagtttttaggattagatttttttttattttattttatttttagtttagaggatataaaagcgtagattgagttaagaggagttgataatattaggtgagttgtggaggtggggtttttggaagttggatgatagtagttggtaaggggataagagagtagtgagttttttttttaaggaggtttggttttatttatagatagggttttttgaggtggggttgaggtataaagggggattgagtagtttaggagaagagagatgggggttttttttttttttttttttagatgtatggtggatttaggattttgttgggttgggggttttattgtagagatgaagttgtttttggttttagtagggtttttggttattttggttacgttttagttttttgaaggtgttgttttaggtaatagtttttaaggtgggagaagatggtgtgttggggtggttgtgttttagagatttttttttttagagtaggtttttttagttttggggtttgatagggggttggggtttatttttgattttgtgatttttgttttgggtagttgttttgggggaggtggatatttcgttggtgttgagttttatggaggaggttaagtagttggtggataaggtttataaggagcggcgggaaaggtggggtacgaggtattgtttagttttgggtaaggatgttttaggttttttagagaagtagtaggtagtagggagtttgaaggtgggagagggggattatggggatttatgtggattttttttttgtttgtttgtttttgtgtttttggatgggagaatagtttaaaagttattttttttaaagttttgtttttgtttggatatttaggtttatattttttttataaaaggaagttttttttttattcgtgggtttgtttgtatggttttgtatgtttgtttttgggttggggttttgttgggtgggtttgtattttttttttggtttttattttttttttttttaagtagtattaagtagcggtttcgtagcggtttagttagttttatggaatttttattttattttaagtagtcggtggtagttattaggacggcggtgagggtcgttgattatttgtacgtggttttagatttgttggagaggaagttgcggtttttgtggcgaaggttatttaatgttattggtattgttgtttattatattttaggtttttgttttattagtgattttttttagggattttagtcgttttttagtgatttttttaatttttttttttagggagttttaggagtttttagggttttttagttttaggttgtttgggataggaagtgaggcggtttagtttttttattgttttttttttcggtagatgtgttgacgttcgtttagttgaatgtgttgtttaagttaagcggttgcgtttattaggacgtgggggtgatttgttcggagtaggataaatatcgtattattatcgggatgtgtaataataggtgcggttggttgggggtggttgtaggaatcgggtttagagaggcgtttcggacgttataagtttttcggtgttagcgttttgtttttttttgtagacgtagttttacgttgggggtttttaatcgtgtttttgtgcgttggttgtcggcggagtatgaggacggttttttttttttttacggttggacgttcggggttaagcgtaacggtttttcggtggttttggtgagcgtcggcgggtagagggggcgaggttcggttacgcggtgcgcggatttaggcgttagttgattttcgtgtttcgtaggttcgcgcggtttttaacgagatcgtgcgtttttttattgattagttgatttcggattaggagcgtttatttatgtttatgtaatggggttagttgttggattacgatttcgattttatttttgagtcggtcgttcgggtttttttcgttattggcgttaattgcgagattagttgcgtttagtagtcgttttgtttttcgtttaaggtggttttgtttttcgtttattgtttgggttgggagaggggagattgtttttggaaggggttattttttttttgtgtttaggtttttttttttagacgttgaggaaggttggttttgttttttttgtgtttatagtattggttgtttagttatgatttgt

SEQ ID NO: 2328 - DNA, 2384 bp, Artificial Sequence
  chemically treated genomic DNA (Homo sapiens)
ataggttatagttgagtagttagtgttgtggatataagggaggtagggttagttttttttagcgtttgggaaaggaaatttgggtatagaagggagatggttttttttagaaataatttttttttttttaatttaggtagtgggcgggaagtagggttattttgagcgggaagtagggcggttgttgaacgtagttggtttcgtagttgacgttagtgacgaaggaggttcgggcggtcggtttaggggtgaagtcgaggtcgtggtttaatagttggttttattgtatgaatatgagtgagcgtttttggttcggagttagttgattagtggggaagcgtacgatttcgttggagatcgcgcgagtttgcgggatacggagattagttggcgtttgggttcgcgtatcgcgtggtcgggtttcgttttttttgttcgtcggcgtttattagagttatcgggaagtcgttgcgtttgatttcgggcgtttagtcgtagggaagagagaagtcgtttttatatttcgtcggtagttagcgtataaaggtacggttggaggtttttagcgtggggttgcgtttgtaggggaggatagggcgttgatatcgggaggtttgtggcgttcgggacgtttttttgagttcggtttttgtagttatttttagttagtcgtatttgttgttgtatatttcggtgatggtgcggtatttgttttgtttcgggtaagttatttttacgttttggtaggcgtagtcgtttgatttggataatatatttagttgggcgggcgttagtatatttgtcgggggaaagaataatgggggagttgagtcgttttattttttattttaggtaatttgaggttgaggagttttggagatttttgagattttttggaggaagaagttgaggggattattgagagacggttggggtttttaggaggagttattagtggagtagggatttggggtgtgatgggtaatagtattagtgatattgaatggttttcgttatagggatcgtagttttttttttagtaggtttagagttacgtgtaggtagttagcggtttttatcgtcgttttggtggttgttatcggttgtttgaagtaggataggagttttatggggttggttgagtcgttgcgaagtcgttgtttgatgttgtttggagaaaggaggagtgagggttagagaagggatatagatttatttagtagagttttagtttaggggtagatatgtaggattatgtaggtaggtttacgggtgggaggaaggtttttttttataaaaaggatatggatttgggtgtttagatagaggtaaggttttgggaaggatggtttttaagttgtttttttatttagaaatatagggatagatagatagaaagggagtttatatgggtttttatagttttttttttttatttttaagttttttgttgtttgttgtttttttgaaaggtttgggatatttttgtttagagttgggtagtgtttcgtgttttatttttttcgtcgttttttgtaggttttgtttattagttgtttggttttttttatggagtttagtattaacgaggtgtttattttttttaggatagttgtttagagtagggattataaagttaggaatgggttttaattttttattaggttttagagttaggaaggtttgttttgagaaaaggggtttttggaatataattattttaatatattatttttttttattttgggaattgttatttggagtagtatttttagagggttggggcgtggttagaatggttaggagttttgttagggttagaagtagttttatttttgtagtgagatttttagtttagtaaggttttaagtttattatgtatttgagagaagagaagaagggaatttttatttttttttttttgggttgtttaatttttttttgtattttagttttattttagagggttttgtttatggataaagttagatttttttgagggaggggtttattgtttttttatttttttgttagttgttgttatttagtttttaaggattttatttttatagtttatttgatattgttagttttttttagtttaatttgcgtttttatgttttttaagttgggggtggggtgaggtagaggaaggtttgattttggagattgaattttttttttttttttattggggttggaaggtatatatagaggggtttttgaaatggggggaaggggtaggaaaggagggttagtattgtttttagttttttttttttttttttttgagacgttattttgttttgttgtttaggttgatgtgtaatggtttaagcgatttttttgttttagtttttcgagtagttgggattataggtgtt

SEQ ID NO: 2329 - DNA, 5660 bp, Artificial Sequence
  chemically treated genomic DNA (Homo sapiens)
  unsure 668..669: n is a or g or c or t
gaatttagaattttagattttttggttttggggtttattttggagattttgaggtttaagttatagttttttagttaattatagatttttttttggtttttaaaaggagtttagttttagagggtggttatttattttttagggatgagaagtttttaaggggtattatttaggtattaattttaggaaagatgatagtatattgttataaagttttggttgttttttaagttagtgtaattgtttattttagggatttttcgggatagggtggggaagtggaaggaatcggcgagtagaagagaaagtttgggagggtggaagttagggatttaggggaagtttggttgatttggggatgcgggtgggggaggtgttggatggagttaagtgaaggatagggtgtttgagggaggatgttcgaagtttttttagatttatttatttacggtggtagcggcgatattttagtttattaaagattcgtcgggatggagagttaggaggcgggggttgtcgttaggggtagcggggaggtcggggggtcggggggcggaggtcgggacgagtgtaatattggcgggggaaaaaataatattgtatcgcgtttcgtttttttcgttcgtcggggttcggatttcgttttttatcgtttgaagtcggtcganncggaattcggggcgcgttggggagttgggtttattttggaggttagagagatttggcgttcggaaggtaaagggaatggtaagggggaggggggagggagaacgggagtttgcggagttttagaaggtcgtttttcgacgttcgggcgttgcgcgcgtttgttttttaagtatttagattgcgcggcgcgagtcgtcgttatggtgacgcgtgttttagtaatcgaattgaatggttgttgtttggtaatgtcgggagttgaggtttggggtcgtttatttagttattcgtgtttttttcggtttgcgagttggggggtttttcgtttttcggtcggttttcgggcgcgttgacgttagatgtttttatttcgtttagcgtttgttttagggtttcgtcgtatataaagttcggtttcgggcgtcggcgcgcgggcgagagcggtggtttttcgtttgttgatttgatgcgttttaatttcgtgtttcgtcgaagtgtttttaaagtgttttttttaatttgtgtttttggggttgagaattgttttttgaatataggcggaattgttttcgtcggtttagaggtagtttgcgattgcgggatttaagttttacgtgttgtcgcggtttgggatagtttttttttttcgtgtattcgcgtcgtatatattttttggttgtcgcgtattacgtattttacgtgtgtttttgtttttcgttacgtgtttatttgtttttaatattattttgttttttaaaggatagttttgtgttcgtaaattttattttgttattttatttattttttgttttttttttttttgttttgagacggagttttgttttgtcgtttaggttggagtgtaatggcgcgatttcggtttattgtaattttcgtttttcgggtttaagcgatttttttgttttagttttttgagtagttggggttatagcgttcgttattacgttcggttaatttttgtagtttttagtagagacgaggttttattattttggttaggttggttttgaatttttgattttgtgatttattgcgtttcggttttttaaagtgttgggattacgggcgtgagttatcgtgttacgttcgatttgttttttaagtatataacggtttatatagaacgtgtttaattttttcgtttacgttttaacgtttttttttatatatttcggtgttttttttatatattttaggattttattcgtttagttttattttttttagacgttattattacgcgtttcggagtgtttttttttaaagtttttagtcgtttattatgttgtgcgtttttttttttttggttacggtagtgatttttgtgtttcgggttttgtttttttttcgcgggttttttgttttatttaggtagcgttgtttttattttttttcgttcggttcgagcggttttttagtttcggcggtttagtttcgtaaggttttcggtgattattagagggcgggaggagtttttggttagtggtggagagtggtaaggaaggatttagggtttatcggagtttaggtttatttttttaagtggaaatttttttttttattttttttttggttttttttaaggagggaatttaggttgttggaaagttcggttggggcggggattgtgggttttagggagaattgcgtgtggaacgggatagggagcggttagaagggtggggttatttcgggaagtggtgggggggagggagtttaaaattagtatttagtttatttattatttagtttttttatttttcggtttcgttttgttttagtggattcggggagggcgggaaagtggagtgggagatttaggggtgggtttttcgattttgttgtataggatttcgatttagttggttttgttttttatttttacgttagttgttgttttgaggttaaaattagagtttaggggttttaagttttagattgttttttttttttttttcggagttagggagtggttggtgaaagggggaggttagttggagaataaacgggtagttagggggttgagcgattagagtttttgtattttatttaggaatggttggggaggaggaggaagaggtaggaggtaggggagggggcggggttttgttatttgttatttgtttcggttgtgtttagggcgggcgggcgggagtggggggatcggtataaagcggtaggcgtttgtgttcgttttattttttaaatagtgtttgtttgagtttgttttgttttttttttatttattttattattattatgatatcgggtatttagttttttttttttttgttgttgttttttatagtgtttataggtgaggggtataaggtggggaatgggttgttttgtttaggtggttttcgtggtttttttgtgggttttgttttttggtagacggtattatggaaaggtaagaattgtagatagaggttgttttgtttgtgttagaaggagggagaggttaaggataggttgagaagaggtgtttttaattttgagagtgggtattaggggtaagtaaatgttttgaagagaagtttagggggaagagagtagggagagggaaggtttaagaggggagaaatgtaggggttatgagtcgaggtttatgggtagagagaaggaggttgggtagggaaggaggcggttaatttaggggttattgaggttgtttattttttagtttttttggtattatttttttggtggttagagtttatattttttttttgtttttattgtttttttaatttaattttatgattttaattttttatagttattatagtttttaaatttataatagttgttataggtttcggttatgtaagttttattttaggtggagaaaaggagatttcggttatttaaagaagtttaatgtttagttttattgagaagaaggttgtgagtatgattagtagtgtattttttagttatagtttcggtttaggtttttttattatttagggataggacgttagtttggttttagttacggaattagttttaggtttagttgttatttggggataggatgttatttcggttttagttattaggttagtttcgggttttattattttattagtttaagatgttattttagtttcggatattaggtcggttttgggttttatcgtttttttagtttacggtgttatttcggtttcggatattaggtttattttgggttttatcgtttttttagtttacggtgttatttcggtttcggatattaggtttattttgggttttatcgtttttttagtttataatgttatttcggttttaggttttgtattaggtttagtttttattttggtgtataacggtatttttgttagggttattataattttagttagtaagagtattttatttttaatttttagttattattttgatatttttattatttttattagttatagtattaagattgatgttagtagtatttattatagtacggtatttttttttattttttttaattatagtatttttttttagttgtttattggggttttttttttttttttgtttttttatattttaaatttttagtttaatttttttttggaagattttagtattaattattattaagagttgtagagagatatttttgaattggtgagtattggtttttttttttttatgtttttttgaagtagttattagaattgtttatatattaaatttgagtttttttttttttattttagattttgtagatttataaataaggggattttttgggcgtttttaatattaagtttaggtatagttttaggtgtggaattaggtgtggtggttggagggtgggtggtggttatgatcgtaggagggattggtatatttaaggttgggggtgagtgttgagttagagttgggattcgtggttgaagtgtttatttttttgtgattaggttaggatttgtggtggtataatcgattttggtttttcgagaaggtattattaatgtttacgacgtggaggtatagtttaattagtataaaacggaagtagtttttcgatataatttgacgattttagacgttagcggtgaggttatttcgttggttgtagttagtattacgtcggagttttttttttagtgtttgggtttttattttttttttagtgttggtagcgggaggggtattttttttgggagattgttttgattattgtttttttttttagtgagtgatgtgttattttttttttttgtttagtttggggttggggtgttaggttggggtattgcgttgttggtgttggtttgtgttttggttgcgttggttatcgtttattttattgttttggtgagtgtagtttttggttttgattagagtttttcggtagaaggtattttatggtttgttataattttttatttttttaggttgtttgttagtgtcgtcgaaagaattacgggtagttggatatttttttagttcgggatgtttattattttatgagcgagtattttatttattatatttatgggcgttatgtgttttttagtagtattaatcgtagtttttatgagaaggtgagattgggttttataggcgggggaggtagaggttttggttgggtaagggttttgaagggggtatttggaaaatttagagagtttggaagaggtgagaagtggtgtgaagtgagtaggggagggtttggtaaagatggggggtagaggttagaggagttttgggggataggtttgggaggagattacggaagaaaggggtttttaagagggagtggttttattgttagaatttcgaatttttaaaagagtattggttgtttatatttatgttggttggtattggttgaattggtgttatcgtggtagttttgttttgttttgttttgttgtatttagaggtaaaatgggtggagtattattttaggggagttttttcgaggagttaggggtgagttcgtgttt

SEQ ID NO: 2330 - DNA, 5660 bp, Artificial Sequence
  chemically treated genomic DNA (Homo sapiens)
  unsure 4992..4993: n is a or g or c or t
gggtacgggtttatttttgatttttcggaagggtttttttgggatagtgttttatttattttgtttttgggtgtaataaaataaaataaaataaaattgttacggtggtattagtttagttagtgttagttagtatgaatgtggatagttaatgtttttttaggaattcggaattttggtagtggggttatttttttttgagggtttttttttttcgtagtttttttttaggtttgttttttagaatttttttgatttttgttttttatttttgttaggtttttttttgtttattttatattattttttattttttttaagttttttgggttttttaagtattttttttagaatttttgtttagttaaagtttttgtttttttcgtttgtggggtttaattttatttttttataggggttacgattggtattgttagggggtatatagcgtttatgggtgtggtaggtggggtattcgtttataggatggtaggtatttcgggttggaaagatgtttagttgttcgtagttttttcggcggtattgatagatagtttggggagataggaggttatggtaggttatggagtgttttttatcggggggttttgattagggttagggattgtatttattaaggtaatgagatagacgatggttagcgtaattagaatatagattagtattagtagcgtaatgttttaatttggtattttagttttagattgggtagagaaaggaaatggtatattatttattaaaaggaaaagtagtggttagggtagttttttagaggaggtgtttttttcgttgttagtattaaggaaagagtggggatttagatattggaagaagggtttcggcgtggtgttggttgtagttagcgaagtagttttatcgttgacgtttgagatcgttaggttatatcgagaggttgttttcgttttatgttgattgaattgtgtttttacgtcgtggatattggtggtattttttcggaaggttagagtcgattgtattattatagattttggtttggttatagggaaatgggtattttagttacgggttttagttttggtttagtatttatttttaattttgagtgtattagttttttttacggttatgattattatttattttttaattattatatttagttttatatttagaattgtatttgaatttaatattggagacgtttagaaaatttttttgtttataaatttgtaaaatttggggtgagagggaaaggatttaggtttgatgtgtggatagttttgatggttgttttaggggagtatggggaaggaaaggttaatatttattaatttagaaatgtttttttgtagtttttggtagtagttggtgttgggattttttagagaggaattaaattggaggtttgaaatgtgaaaagataggaaaaaaaaagagattttaatagataattggggagaagtgttgtgattggaggaggtgagaggagatatcgtgttatggtgagtgttattggtattagttttggtgttatggttggtaagggtggtaggagtattagagtggtggttgggaattgaaaatggagtgtttttgttggttggggttgtggtagttttggtagaggtgtcgttgtgtattagagtggaagttgagtttgatgtagagtttgaggtcgaggtgatattgtggattggaggggcggtggagtttaaggtgggtttggtgttcggggtcgaggtgatatcgtggattgggggggcggtggagtttaaggtgggtttggtgttcggggtcgaggtgatatcgtggattgggggggcggtggagtttaaggtcggtttggtgttcggggttgaggtgatattttgggttggtgaggtggtggagttcggggttggtttggtgattgggatcgaggtgatattttgtttttaggtggtagttgaatttgaggttggtttcgtggttggggttaagttgacgttttgtttttgagtggtggaggagtttgaatcggggttgtggttggagagtatattgttggttatatttataattttttttttagtagagttgggtattgaatttttttgggtagtcgaagtttttttttttttatttggggtagagtttgtatgatcggaatttgtaataattgttgtgggtttaggggttgtggtagttgtaagaagttaaagttatagggttgggttggaggaataataagagtaagaagaaagtataagttttggttattagagaaataatattaggaggattggggagtgggtagttttagtaatttttgggttggtcgtttttttttttgtttagtttttttttttttgtttataggtttcggtttatggtttttgtatttttttttttttaagttttttttttttttatttttttttttttagatttttttttaggatatttgtttgtttttggtatttatttttagagttgggggtatttttttttagtttgtttttagtttttttttttttttggtatagatagggtagtttttgtttgtaatttttatttttttatggtgtcgtttgttagggagtaaaatttatagaaagattacgaagattatttaagtagggtagtttattttttattttgtgttttttatttgtaagtattgtgaggagtagtagtaggaagaaaagagattgggtgttcggtgttatggtggtggtgaaatgggtggggagggggtagaatagatttaggtaggtattgtttgagaggtggagcgggtataggcgtttatcgttttatatcggtttttttattttcgttcgttcgttttaggtatagtcggagtaggtgataggtgataaaatttcgtttttttttttattttttatttttttttttttttttttaattatttttgggtagggtataagggttttaatcgtttaattttttgattattcgtttgttttttagttggttttttttttttattaattattttttggtttcgggggaggggggaggggtagtttggaatttggggtttttgggttttagttttagttttagggtaataattaacgtggggatggggaataaagttagttaggtcgaggttttgtatagtaaggtcgggaagtttatttttaggttttttattttattttttcgtttttttcgggtttattgaagtagagcggggtcgagaaataagagggttggataatgagtggattaggtgttagttttgggtttttttttttttattatttttcggaatagttttatttttttaatcgttttttgtttcgttttatacgtagttttttttgaaatttatagttttcgttttagtcggattttttagtagtttgggttttttttttggagaaagttaaggagggagtgggggaagaaatttttatttaagggagtaaatttgggtttcgatgaattttaggtttttttttgttattttttattattggttaggagtttttttcgttttttagtggttatcgggagttttgcggggttgggtcgtcgaagttgaggggtcgttcggatcgggcggagaggagtaagggtagcgttgtttaagtgaggtagagagttcgcgagagggaagtagggttcgggatataagggttattgtcgtggttagggagggaggaacgtatagtatggtggacggttgggagttttaggagggggtatttcgggacgcgtggtggtggcgtttggaggaaatggagttaagcgggtggggttttgaggtatgtggaaggggtatcgaggtatgtgggagaggacgttggaacgtgggcgggggagttggatacgttttgtgtgggtcgttatgtatttaagaggtagatcgggcgtggtacggtggtttacgttcgtaattttaatattttggaaggtcgaggcgtagtggattataaggttaggggtttaagattagtttggttaagatggtgaaatttcgtttttattaaaaattataaaaattagtcgagcgtggtggcgggcgttgtaattttagttatttaggaggttgaggtaggagaatcgtttgaattcgggaggcggaggttgtagtgagtcgagatcgcgttattgtattttagtttgggcgatagagtaagatttcgttttaaaataaaaaaggggggggtagagagtaggtggggtgatagaatgggatttacggatatagaattattttttggggagtagagtggtattggggataggtaggtacgtagcggggggtaaaagtatacgtgaggtgcgtaatgcgcgatagttaagaggtgtgtgcggcgcgaatgtacgaggggaggaagttattttaggtcgcggtagtacgtggaatttgggtttcgtagtcgtaggttgtttttaggtcgacggaagtagtttcgtttgtatttagaaaatagtttttagttttaaagatataggttggaaagaatattttaaaaatatttcggcgaggtacgggattggagcgtattagattagtaggcgagagattatcgttttcgttcgcgcgtcggcgttcgaggtcgagttttgtgtgcggcgagattttggggtaggcgttgggcggggtggggatatttgacgttagcgcgttcgggagtcggtcggggagcggggagttttttaattcgtaggtcggagaaaatacgagtagttaggtgggcggttttaaattttaattttcggtattgttaagtaatagttatttagttcggttgttgggatacgcgttattatggcgacggttcgcgtcgcgtagtttgagtatttaaagagtaagcgcgcgtaacgttcgggcgtcggaaagcggttttttgggatttcgtaaattttcgttttttttttttttttttttttgttattttttttgtttttcgggcgttaagtttttttggtttttaaggtgaatttaattttttagcgcgtttcgggtttcgnntcggtcggttttaggcggtggggagcgggattcgggtttcggcgggcgggagggacgggacgcggtgtagtgttgttttttttttcgttaatattgtattcgtttcggttttcgtttttcggtttttcggttttttcgttatttttagcggtagttttcgttttttggttttttatttcggcggatttttgatagattggagtgtcgtcgttgttatcgtgagtaagtgggtttgggaggatttcgggtatttttttttaggtattttattttttatttaattttatttagtattttttttattcgtatttttaaattagttaaattttttttagatttttaatttttatttttttaggtttttttttttattcgtcgattttttttatttttttattttatttcggaaaatttttaaaataagtagttgtattggtttagaaaataattaaaattttatggtaatgtgttgttattttttttggggttagtgtttgagtaatattttttgaaaattttttatttttgaagggtgggtgattattttttgggattgaattttttttgggagttagagaagggtttgtggttggttgaggggttgtagtttagattttagggtttttaggatggattttaaggttaaagggtttaaaattttgaattt

SEQ ID NO: 2331 - DNA, 12237 bp, Artificial Sequence
  chemically treated genomic DNA (Homo sapiens)
gaattttattaaagatttaagaaagaagtatgttaattttgtataaatttttttaataataattgaaaagagaggaatatttttaattttttttttgaggttagtattatttcgattttaaaattatataaaaatattataagaagattatgaattttttttttgaaagtagtttttagatataagttttatttgatatattaatatgttagattgtttttaaatgaaagattgtgtattaaatgaaagaaggggtttatgaaggtgttggaaatgagattatcgggaaaagagtgtgggaagggggtttttttattttttttatttataatttaatttaataaatatacggtatattatttttgttattttttgttttatgttttttggttattttgataatgtattttattattgtggttagttttttttttgatttttttattaaataaagtgtttatatttttggaaaaaaaaaaaagaaggttatgaattaatattttttataaatatagatgtaaaaattttaaataaattaaaaaaatattttattttaagttttgggatgtatgtgtagaacgtgtaggtttgttatataggtaaacgtgtgttatggtggtttgttgtatttgttaatttattatttaggtattaagttttatatgtattatttatttgttttgatgttttttttttttttattttttattttttattaggttttagtgtgtgttgtttttttttttgtatttacgtgtttttattttaaataagatttttttaaatcgaattaaaaaatttattaaaattataattataggggatttattttaagaatttagagttggtttaatatttaaaattaatgtaatttattatgtgaatagattaaagatgattaattataggattattttagttaatttagaagaacgtatttgattagatttaatatttatttttgataagaatttttttaaaaatagaatataattttttttatttttataatggtatttataaaagtttgtagatgatttatatttaaatattaatgtttttttttgaaattaggaataagattaagatatttgtttttattatttttaatgaatatggtgttggaaagtatagttaggtaatcgggaaggtgaatatatttaaaagatttagattggaagggggagtgaaattgtgatagatgatgtgattatttgtgtataaacgagtatttataaaggtagcggtagttgttttttgatatttacggggtatgggtgttagtattttaggatataaaatgtatgcgtgcgttaatttttatataaaatggtatagtttttgtatataattatatatatttttttatgtattttatttatttattttttttgatagaatttttttttattatttaagttggagtgtagtggtgtgatttaggtttattgtaatttttgttttttgggtttaagtaatttttttgttttagtttttcgagtagttgggattataggtaattgttattatttttggttaatttttgtatttttagtagagatagggttttattatgttggttagattggtttcgaatttttgattttaggtgatttattcgtttcggttttttaaagtgttgggattataggtatgagtattacgtttgattatattttttcgtatacgtttagagatttatttgtgttatattttattagtttaaaatttatattaggggttagggttagtggttacgttatgtaattttatattttgggaggtcgaggtaggtggattatttgaggtcgggagtttgagattagtttggttaatatagtaaatttttgtttttatttaaaaatataaaaaaaatttagttaggtatggtggtgtgtgtttgtaatgttagttatttttgtggttgaggtagggtgcggtggtttatgtttgtaagtttagtattttagggaggttgaggtgggtagattatttgaggttaggagtttaagattagtttggttaatatagtaaaattttgtttttattaaaaatataaaaagtagttgggtgtggtggtgggcgtttgtaattttagttatttgggaggttgaggtaggagaattatttgaatttgggaggtggaggttgtagtgagttaagattgtattattgtattttagtttgggtgataaagtaagattttattttaaaaaaaaaaaaaaattaaaagtaggttttgttagatatttgtatatttatgtttatagtagttgaagttatttaagtgttttttgatagatgtagggataaatagtatgtggtttgtttttatagtggtatattattttgttttgataagtaaggaaggaaattttgatataggttataatatatagatgatatgaggtcgagtgaaataagttagatataaaaagattaatattgtattattttatttatttgaggtattttaagttgtcgagatttatagtaataggaagaggatggtggtttttgaggttgggggaggagggtgtgtgtttagtgggagtagagttttagtttaagaaaaatgaaggtgttttggagttgaatgttggtgatggttgtatagtatggtgatatagttaatattattgagttacgtatttaagattgcgtaagatgagaaattttgttatgtgtatttttttataataaaaagttttaaaaaattaattgtatttttttatattagtaataaataattggaaatgggaataaataatattattataacggtataaaaatatgaaatatttagggaaaaatttgataaggatgtgaaagacgagtacgttgaaaattgtaaattattgggagggaattagagatttgtagaaataggtatgtatattttgtttatgggttggagattttatattgttaggacgtaagttttttttaaattgatatatatatttaatgtaattttagttaaaatttttgtaggtttttttttttttggtagaaattgataaattgagattaaatttagagggaaatgtagaggatatagaagagttaacgtagttttgaaaaaggggtaaagttggaggaaattgaaatattggttgggattgagaattgttataaagttataataattaaaatagtgtagtattagtataatgatagataaataggttaatgaatagagtaaagtttagaaataaatttatgtgtatataataataattattttttttttaaaaaaatttttttttgagatagggtttgattttgttatttaggttggagtgtagtggtatgattttagtttattgtaaggtgtatattttgggtttaagtgatttttttattttagtttttttagtagttatataggtatatgtttttttatttggttaattgaattttgaagaaaggagtagaagtattgtaatgaagaaagaatagttattgttaataaatggggttagaataattggatatttatatatataagataaattttaagttatattttatattatatataaaaaattaatttaaaatgtattatggaaaattttaaattataaaatttttaaaagaaaatataggggaaaatatttgtgtgattttgggttaggtaaagattttttatatgtaatattaaaggtaaaattataaaaaagtaaattgattaattggattttattaaaattttgaaatttttattttaaaaaatattattgagagaatgaaaagataagttatagattgggagaaatatatttataaaggatttttttaataaaggattcgtatttagaatatataaataatgtttagattttaaaaagaaatttattttaataatttaataaataatgggtaaaagatttgagtaggcgttttattaaagaagatatatggggtttataagtttgggagtaaattgatttttttttttgtaagaaattagatattttaagttaaatagttatataaggatgtgaggagaaagtgttttgataggaattgttatattagttataagtatattattaaagatttttttataatggatttaatatttaaatatagtatttagtatttgttgaaaaagtaaaattatataataggggtttttaaaataattttttttttgagatagttttattttgttgtttaggtttgagtgtagtagtacgattttggtttattgtaacgtttgtttttcgggttttattgatttttttgttttagttttttaagtagttgggattataggtgcgttattacgtttggttaatttttgtatttttagtagggatggggttttattatgttggttaggtttattttaaatttttgattttaggtgattcgtttgttttgttttttaaagtgttgggattataggtataagttattgtgtttggtttaaaataaagttttttaaaaagtgaaaaaaagaagatatatggatggtagataagtgtataaaaaaatttttaatattattagttattagtgaaatataattttaagtaataatgagataatattatatatttattggagcggttaaaattaaaaagattgattattttaagtgttgataaggttgtggggtaacggatgttttatattttgtcggtgggaatgtaagaaaggtataattattttggaaagtagtttagcgattttttaaaaagttgaatatagatttatttgtttgatttagatattttatttttaggtatttatttggtagaaaagaaagtgtatgtttatatttaagattatataaatgttcgaagtagttttgttcgtagtggttttaaatggataatgagtttagtgtttattagtagggaatgaatgagtttaggaaggaatgagttatttatatagtaatgttggatgtaattttaatataattatgtttagtgaaagagatcgaagaatgtatattgtatagttttatttatatagaattttagaaaatgtaaataaattgtaaagttttagaaaatgtaaataaatgttatggaaaataaattttgggtagttttcgagtggggaagggtgggagggagagattttaaagaggtgaaggagttttgtgtgggtgatgggtggggatatatttattttgattggggtggtggttttttaagtttaattaatttatgttaaaattgatttaattatatacgtaaatatgtgcggttattgtatgttaattttaatttagtaagttgttttagtttgtgttaacgtatttttttgattagtaaattttaagtgttttttttgttgttatataaaattttagttataatttatagtggatgtatgttatttagagttgtttggtttttagagatttaaaattaattagagaaatatattagagtttaaattatagtgatagtaaaaaatgattagtgtttgttagggatttgtggggaaggatggaatagttgagatatagggtatgtgttagggtggtataattattttgtatgttattattttggtggatatttgatattttatatttgtaaaatttagaaaatttaatagtgtaagagtgaattttgatgtatataaatataaaaatatttaggaggttgagggatgttatagatgaaatgcggaatgtggtaaaataatttaattgtattttaaatgtatgaaataaatttatagaagggggcgggggtggagggatgttgaagggttttgatttttgggtatttcggtaaggagtaagggggtattgagatttttgttttggggttacgatattatttaggaatttttgatttttttgttattatgattggggtttttttaaaaagtaatagttttttttgtaaaaagtggttatattattattaagcggtggatagtgtaagtttggggttgggaagatttttgggattatattgtagttttgttattttgggttgggtgagtcgaaggagtgtttttattttttttgagttttagtttttttgtttataggatggagtgaggtgagtgttttttttttagggttgagggttttagtgaggtgggtttatagagtagttggtttgtatttgtttattatgagtttttgtgaggtggagttttgtggagttgttatagaaggtgaattttagtattagggagattttatttgtttatttttttatttatttatttatcgattaatttattatttatttatttatttatttatttatttatttatttatttatttatttgtttatttgtttatttatttatttatttatttatttatttatttatttatttatttatttatttttttatttatttatttatttatttagttatttatttatatatttatttatttatttatttttttatttatttattttttgatttatttatatatttatttttttatttatttatgtttttatttatttatttatttatttattaatttatttatttatttatttatttatttatttatttagtttatttttcggatttatttatttatttatttatttatttatttatttatttatttatttatttatttatttatttatttatttatttatttatttatttattttttttttttatttatttatttttgatttatttatttattttttttatttatttatttatttatttatttatttgttgatttatttatttttttttttttttttttatttatttatttatttatttatttatttatttattttatttatttatttattgatttatttatttttttttttgttttttatttatttatttatttatttattttatttatttatttattgatttatttatttttttttttttttttttatttatttatttatttatttatttatttgttgatttatttatttttttttttttttttttatttatttatttatttatttatttatttatttatttatttatttatttatttagaagtaaagttattgagtgtatttgttgtgagggtggttatgggggtttatatggttgttgtttttgtagtattcggagtagatggttagaagggttatatagtgtggttaggtggtgagatagtgtttagtgtgaggatgtgatatttggataagttttgaggtaagtgttttagagtgtttggatttttgaagtatagttatttatttgatggttttggttttgggttgttttttttttaatggagtttgtttagtgttcgtttgtttagtagaggtttggattggttgaggttttttttgattttttatttgagaataaacgtttttgtgtgtttatttgtttattttttatattttatagagtagtggtattaatatttcgttttttatttttgtagtttttggaggtgaagtgtatatttttaggtgttttcgaatttttggagttttaggagtggatatgtttggggtgtttgagtttgttttggagagttggacgtgattggtgttttatttgtttttttttgatttttagatgtttatttgttagggtgtaggtttgggttttgttattgtgtttttgtgtggggttggggttggagttggggttttttttggtgtttagagggttgagaattacggtttttttgggtgtgttttttatttgtttataaagtagggttagagttgtggcgttggggttgggtgttagtttttattattttggttaagtttagttggttgggggttgggtagtttggtgttggtagggttggttgtggtaggatgttttggtttgtagaatgggagtggttagtttggttttttgtgttttgagatgttggttttgagatggagatagaagatgttcggtgatttagtttttttttttgtaatgtgagttaataattagattaattatatagggatatggaaaaatggttttagatgatatatgtgattgatatgtgggtagtttgtatttgttggaggtcgatattttagtaattagtaatgggggttacgtttggattaatatagtatgtagggagataggggttgttacgtggggatatttagggttgcggtgtgggcgggtggagtgttttttaggaaagtaggttttgtgattggtttttcgttttcgtgggagaggtattggttatatggggagtgtttgcgggggtgggtggtgatattttagggaagtaattagtgggtatgggttattattttaggtagtttaggtggttttaggttggagattttcggaggttattaggaggtagacgttttggaggtagtacgttttgttttttggaggattaaggtttttttttttaaggttttgtattgatgtgttagatttatttgtcgttagggttatatttaagaagtttttttatagtagtatttagttcggcgttatgttaaagattggagttatggttagataggtcgatttataaagttatcgttcgagcgatcgggacgtgtgtaggggacgtatttgttgtttttggtttttttagtagtatagggttttttttttagtaaattttttagtttttttttttttttttttttttttttttttttttttttttttttttttttcggtggttttgatttttatatgttttttattcgggttttttggtgagttaggtttgtgatatatagtaggggggtcgttattttaggggttgttatgtgacgttagtgttgttttttttttgtagttattattgtaaattttatgtagtcgttgtaatagtgttttgttacggtaaatatgttgggcgtgggtagggtggggagaggttgggggggttaggatgttgtttgtgtgggaagttgtattttaggatgttgtttgtgtgggaggttgtattttatggatgttgtttgtgtgggaggttgtattttatgtagtttcgttttgagttttagtcggggtttggagttggggtagtttgatatgggttggggatgtgggtttttggtttaattgtgttcggttcgtcgttgggtgggtggttatttttattattgttattatgtttttgttatagaaagtagaatcgataagtatttttttcggagtggttaaagtttttattttttttttttattagggtttttcgaattttatgggaaagttatagagtcgatggggttttagggtaatacggttgtttattttttttattttgtagttgttggaggtcgatattttagtaattagtaatgggggttatatttggattaatataggacgtggggagagaggggatgtagtgttgtggaattgtcggtttttatcgtttttattattatagtatatgttgcgaattggtagtggggatcggttgaggtttggaggtaaagaggttggggatattttcgttttggggttgttagtgattttatagtcgtttcggtttgatggagttttacgtttttttttttagaatagtttttttttttcgttaggaatggggtttagttttttgtattttgttttatgtagggttgtttgtaattttagatagggtttttatttgggattttgttatgggttaagaggggtgttggggttagatttttgagtttgggaattattattgttcgtttagaggggatatagggttagatttaggggatttattttaggttttagggttggaggggttgtgttgggtagtttgtcggttcgttaggatttttttaatttttttagggtagggggagtttggtttggaaaatttttgttttgaggttcgtttggggtattttagggttagggattgtagttggggtcgtttttgggtttttttagggtttagtgttagtgtgcggaggtttatattaggaagtgaataatgattttttcggtttcgtttacgttgggttttgggttttttaattttcggttttttggtaggggttatatattggagttttttttacgtgtttaggttttggtagggagcgtagattttggggtttggtgttgcgggtatcgtaggagggcgggaggggtttgtttttaggttttgggtttgggtagtaggttagtttagggaaataggtttggtgttttgggtttcgagtttttataattgttggggtgagtttttttttattgttattatgttgtcggtatgtttttggtatgtttaggttaaagttaggaatttaatttagggtttttttttatttttaggaggaaaaaattgtagagagaggggagggtttttagattttagtttatttattggcgatataggggtgtttgtttgtgtttttcgggtcggggtaagtagtggtgggtttagtggtttcgtagtttgggtcggtgtgagtttcggttttttaggtttttttttagataattgttgggatggtgggcgagattaaggtttattaaagtatagttttgggggtaggatttttattatgagttagaggtagttttggggagtttgggtaggttgttatttttttagttgttaggttcgaggtttttatgtggtttttaggagaaggggtagacggttattttcggttattagttagttttttgtgtgtttgatttcgtaatatgttttttggttgggtatgtattttttaagttttaattatatgtaattgtagagaagggtttagtttgggaaaaggatgggtatagggggtggttgggggttggggtttttgatatagttttatgagttcggttaagagttttatataagttagtggttttttcggattttgaaggattttatattttttttgttttcggggaggtttttttttggggttaggtttggaagttgttttagagtttgggttttaggaatgggttggtttttttagcgtaacgtgagtttgattaggtttggggatttgtttagcgggtgtttgggggttatggcgggttaaggagtttgattagatttgtttttggtaggatatttttttttcggttattttgggttcgtttttttagtagttgtatgtgtttttcgggtgtgtgttggtatttaggttatagggttgttttattttgaagaaggttgcgtttatttagggagttataaagagatgattttcgataatttgaattaatattttttattggttcgggttttcgtagttgtttttttgattatttggtagatgttatatttatttttggtttttttttgtttttttgtttttttatttttttgttaggatatataaggattagattttttttcgggcgtaatttatatcgtttttgttagttattatggggttgttattagttcgtttggcggttgtgtgtttggttttgtttttggtagggggttcggagttttagataggtgagagagtagatataggggtttggggtttggtagagtgttttgggggtagggcgaggcgggcgggtaagtcgcgtttgggaggaggagttggttttagagtgtatttgcgcggttttgttgaggtttttggttcgggttggtttttggaattttcggttttgttgatttttaaggagttggaaggtcggggtttttttgttatttttttggggttgattgttcgacgatagtgtgggttttggggttagtattaggtggaaatagtaggttaggttttagtgaattgggttattgtttataggggaggaaggggtggttaggatttattagaaggttttatttttaggtggtagagatttttgaagagttggggtagtatagttttttttggggagcggggtgtttagaatgtttttttttatatttcgtttggtattcggtcgtattttttattaggtcgggggtagaagttttgagatttttgaggtggggtgattaaggtttagtagagggttcgaggataggaaggaatttttttcggttaggggtttgtgttgggttcgaagttgtttttaggtgtttttttaggggttttttttcgagggtagtttgggtaagttttttttttgggttatttatttttatttttcgttgtttttttagagggtagaattcgatattacggtcgtaacgtttgtagtatttggggtaatttttattataagattttcgacggggacgtttttcgttttttcggtttttgcgattataatttcgttttcgattgtcgaggtttttataaggaatttgttgtgtatttgaagcggggttcgggttaggttgaggttttcgtcggggtggagtt

SEQ ID NO: 2332 - DNA, 12237 bp, Artificial Sequence
  chemically treated genomic DNA (Homo sapiens)
gattttatttcggcgggggttttagtttggttcggatttcgttttaggtgtatagtaaattttttgtaggagtttcggtagtcggaggcgaagttgtagtcgtagaggtcggggaagcggaagacgttttcgtcgaaggttttgtagtggaagttgttttaggtgttgtagacgttgcggtcgtggtatcgggttttgttttttgagggagtagcggggaatgagggtgagtggtttaggaggaaggtttgtttaagttattttcgagagaaggtttttgaagaagtatttggaagtagtttcgagtttagtataggtttttggtcgggaaaggtttttttttattttcgggttttttgttgggttttggttattttattttaggggttttagggtttttattttcggtttggtgaggagtgcggtcgggtgttaagcgggatgtaggagagggtattttgggtatttcgttttttaggaagggttgtgttgttttaattttttaagggtttttgttatttgagaatggggttttttggtggattttggttattttttttttttttatggataatgatttagtttattggggtttgatttgttgtttttatttggtgttggttttaagatttatattgtcgtcgggtagttaattttaaaggaatagtaggggagtttcgattttttagttttttgaaagttagtagggtcgggggttttagggattaattcgggttaggagttttagtagagtcgcgtaggtgtattttgggattagtttttttttttagacgcgatttgttcgttcgtttcgttttgtttttaggatattttgttaggttttagatttttgtgtttgtttttttatttgtttggagtttcgagttttttgttaaagatagggttaggtatatagtcgttaggcgggttagtggtagttttatggtggttggtaggggcggtgtgggttgcgttcggggaggggtttggtttttatatgttttggtaggagggtaggagggtaggaaggtaggggagggttaagggtgggtgtggtatttgttagatgattaagaagatagttgcgggggttcgagttaatgggaaatattgatttaggttatcggaggttatttttttatggttttttgggtaaacgtagttttttttaggatgaggtagttttgtagtttgaatgttaatatatattcggggaatatatgtagttattagaggggcgagtttagggtggtcgggggaggggtgttttgttagaagtaagtttggttaggttttttagttcgttatggtttttagatattcgttgagtaggtttttaggtttgattaggtttacgttacgttgggaggattaatttatttttggggtttaagttttggggtagtttttaggtttgattttagaaaggggttttttcgagggtagggaggatgtgggattttttagggttcgggggggttattgatttgtgtgggatttttggtcgggtttatggagttgtgttagaggttttagtttttaattattttttatgtttattttttttttaggttgagtttttttttgtagttatatgtaattagaatttggggagtatatgtttagttaggggatatgttacggaattaggtatatagggagttggttggtggtcggaagtggtcgtttgtttttttttttggggattatatgaggatttcgggtttgatagttgaggaggtgatagtttgtttaggttttttagaattatttttgatttatggtggggattttgtttttaaggttgtgttttgatgagttttggtttcgtttattattttagtagttgtttggaaaaaagtttggagaatcggaatttatatcgatttagattacgagattattgggtttattattgtttgtttcggttcgggaggtataggtaggtatttttgtgtcgttagtgggtaaattgaggtttgggggtttttttttttttttataattttttttttttgaaaatagagaggggttttgagttgagtttttggttttggtttgaatatgttagggatatgtcggtagtatgatggtagtggggagggatttattttaatagttatagagattcggggtttaaagtattaagtttgtttttttaggttgatttgttgtttagatttagggtttgggagtaagtttttttcgtttttttgcggtgttcgtagtattaggttttagggtttgcgttttttgttaggatttgggtacgtggaggaagttttagtgtgtggtttttgttaggaggtcggggattaggaaatttagagtttagcgtgggcgaggtcgaggagattattgtttattttttggtgtgggttttcgtatattggtattgagttttggggaaatttaaggacggttttaattgtagtttttgattttgagatgttttaggcgggttttaggatagagattttttaggttaggttttttttgttttggggggattggaggaattttagcggatcgataagttgtttagtatagtttttttagttttgaagtttgaggtaggttttttagatttgattttgtgttttttttggacgggtagtggtggtttttaggtttaggggtttgattttaatattttttttggtttatggtaaggttttaggtaggagttttgtttgaggttataggtagttttgtatggggtagggtgtagagagttgaattttatttttaacggggaaagggagttgttttggggaagaggacgtagggttttattaggtcggggcgattatggagttattggtaattttaaagcgagagtgtttttagtttttttgtttttaagttttagtcggtttttattgttagttcgtagtatgtattgtggtggtggaggcgatgggggtcggtagttttatagtattgtattttttttttttttacgttttgtgttggtttaaatgtggtttttattgttggttattgaaatgtcggtttttagtaattgtagagtgggaagagtgggtagtcgtattgttttgggattttatcgattttgtggtttttttatggggttcgagggattttggtggagggagagagtgggggttttgattatttcgaggaaaatgtttgtcggttttgttttttgtgataagaatatgatggtagtggtgggaatgattatttatttaacggcgggtcggatatagttgagttaggagtttatatttttagtttatgttaggttgttttagttttaggtttcggttgggatttagaacgaggttgtatggagtatagttttttatatagatagtatttatggagtatagttttttatatagatagtattttggagtatagttttttatatagatagtattttggtttttttagtttttttttattttgtttacgtttaatatgtttatcgtgataagatattgttgtaacggttgtatggaatttgtagtagtgattgtagggaggaggtagtattgacgttatatggtaatttttgaagtgacggtttttttattgtgtattataaatttgatttattaggaagttcgggtgaggggtatgtgggggttagagttatcggagaagagggagagggaaaggaggaggaggaaggggaaggggaagaggaggttggggagtttgttagaagagagattttatgttgttgggggagttaaagatagtaggtgcgttttttgtatacgtttcggtcgttcgaacggtggttttgtgagtcggtttgtttggttatggttttagtttttggtatggcgtcgggttggatgttgttgtgaagggattttttaaatgtgattttggcgataggtgggtttgatatattagtgtagggttttgaaagaaaagattttggttttttaaggagtaggacgtgttgtttttaggacgtttgttttttgatggttttcgggggtttttagtttgaggttatttaggttgtttgaagtaatggtttatgtttattgattgtttttttggagtattattatttattttcgtaagtattttttatgtggttaatattttttttacgggggcgggagattagttatagagtttgtttttttggagagtattttattcgtttatatcgtagttttaggtatttttacgtggtagtttttgtttttttatatgttgtgttggtttaaacgtggtttttattgttgattattgaaatgtcggtttttagtaagtgtaggttgtttatatgttagttatatgtgttatttggggttatttttttatgtttttatgtggttggtttgattattagtttatattatagaaggggaaattgagttatcgagtattttttgtttttattttaaggttagtattttaggatataagaggttaggttggttatttttattttgtaggttagagtattttgttatagttaattttgttagtattaggttgtttagtttttagttaattgggtttaattagggtggtgggggttggtatttaattttagcgttatagttttggttttgttttgtgggtagatggagagtatatttagagaagtcgtggtttttagttttttggatattaaggaggattttagttttaattttagttttatatagggatatagtggtaaggtttagatttatattttggtaggtgagtatttgaggattaagggagggtaaataagatattagttacgtttagttttttagggtagatttagatattttaagtatgtttatttttggggttttaaaggttcggagatatttggaggtgtgtattttatttttaaggattgtagaggtgaaaggcgggatgttggtgttattgttttgtgaggtgtggagggtgagtaagtgagtatatagaggcgtttgtttttaggtgagggattaagagaggttttaattagtttaggtttttgttgggtaggcgggtattgggtaggttttattgaggaaagggtagtttagggttagggttattaggtggatagttgtgttttaggagtttagatattttggggtatttgttttaagatttgtttaggtgttatatttttatattgaatattgttttattatttggttatattgtgtgatttttttggttatttgtttcgaatgttgtaagggtagtagttatgtgggtttttatggttatttttatagtagatgtatttaataattttgtttttgggtgggtgggtgggtgggtgggtgggtgggtgggtgggtggatggatggatgggaggaagggagggggaatgaatgggttagtaggtggatggatggatggatggatagatgggaggaagggaggggaaatgaatgggttagtgggtagatggatgggatggatggatggatggatggatgggaagtagggagggaaatgaatgggttagtgggtagatggatgggatggatggatggatggatggatggatggatggatgggaggaagggagggggaatgaatgggttagtaggtggatggatggatggatggatggatggaagggatggatgaatgggttagggatggatggatgggagggagggatggatgaatgggtgggtggatggatggatagatgaatgggtgggtgagtggatggatggatggatggatgagtggatgaatgggtgaattcgaaggatggattggatagatggatggatggatggatggatagatgggttagtgaatggataggtggatggatggaggtatggatgaatggagggatggatgtgtggatgggttaaagaatggatggatgaaaggatggatggatagatggatatgtgagtgagtgattggataggtggatggatgaatggagagatggatgagtggatgagtggatggatggatggatggatggatggatggatggataaatggatagatagatggatgagtgggtgggtggatgggtgggtgggtgggtggatgatggattaatcggtgggtgggtgggtaaaaggatggataaatgaaatttttttggtattggagtttattttttgtggtagttttatagggttttattttataagagtttatgatgagtaagtataggttaattgttttataggtttattttattggagtttttaattttgggaggaaggtatttattttattttattttatagataaggaaattgagatttagagagggtgaaagtattttttcggtttatttagtttaagatggtagagttgtaatgtggttttagagatttttttagttttaaatttatattgtttatcgtttgataatggtgtggttattttttgtaaaggagattgttgttttttggagaaattttagttatagtaatagaaagattaggggtttttgggtggtgtcgtagttttagggtaggaattttagtgtttttttgttttttgtcgaagtgtttaaaggttagggttttttaatatttttttattttcgtttttttttgtgagtttattttatgtatttgaaatatagttggattgttttgttatatttcgtattttatttgtggtattttttaattttttgaatatttttatgtttgtgtatattaaggtttatttttgtattattaagttttttgggttttgtaaatgtagagtgttaaatatttattaggatagtagtatgtaaaatggttgtattattttaatatatgttttgtgttttagttattttatttttttttataaatttttggtaagtattggttattttttattgttattatagtttgggttttaatatatttttttgattaattttaaatttttaagagttaaataattttagataatatgtatttattataaattatgattaggattttatgtggtaataaggaaaatatttaggatttattggttaggaaagtgcgttgatataggttaaaatagtttattgagttagaattgatatataataatcgtatatgtttacgtgtatgattgggttagttttgatataaattggttgaatttgggaaattattattttaattaggatgaatatgtttttatttattatttatatagggtttttttatttttttggaattttttttttttatttttttttattcgggagttatttagggtttgttttttatggtatttgtttgtattttttaggattttgtaatttgtttgtattttttaggattttgtgtaaatggaattatatagtatgtatttttcggttttttttattaagtataattatgttgagattgtatttagtattgttgtgtaaatagtttatttttttttgggtttatttattttttgttaatggatattgggtttattgtttatttgaggttattacgaataaaattgtttcgaatatttgtgtaattttgagtgtggatatatatttttttttttgttaggtaaatatttaggagtggagtatttggattagataggtaggtttatgtttaattttttgagaaatcgttaaattgttttttaaagtggttgtattttttttatatttttatcggtagggtatgagatattcgttattttatagttttgttaatatttgggatggttagtttttttaattttagtcgttttagtaagtgtgtgatgttgttttattattatttgaaattgtattttattaatgattaatgatgttaagaatttttttatatatttatttgttatttatatgtttttttttttttattttttaaaaaattttattttagattaggtatagtggtttatatttgtaattttagtattttgggaggtaaggtaggcggattatttgaggttaggagtttgagatgaatttggttaatatgatgaaattttatttttattaaaaatataaaaattagttaggcgtggtggcgtatttgtaattttagttatttgggaggttgaggtaggagaattagtggaattcgggaggtagacgttgtagtgagttaagatcgtgttgttgtatttaagtttgggtaatagagtgagattgttttaaaaaaaaaattattttaaaaatttttattatatagttttgtttttttaataaatattgggtgttgtgtttaaatattaaatttattatagagaaatttttggtaatgtatttgtgattagtatagtaatttttgttaaagtattttttttttatatttttgtgtgattgtttaatttaggatatttaattttttataaaaaaaaaagttagtttatttttaggtttataagttttatatgttttttttagtgaaacgtttatttaaattttttgtttattatttattgggttattggggtgggtttttttttaagatttaaatattatttatgtattttagatacgagttttttattggagagattttttgtagatatattttttttagtttgtggtttgtttttttatttttttaatagtgttttttaaagtaggagttttaaaattttgataaaatttaattgattaatttatttttttataattttgtttttggtattatatgtaggaaatttttgtttaatttaagattatataaatatttttttttatgtttttttttagaaattttatagtttggggttttttatgatgtattttgagttaattttttatatgtagtatgaggtatggtttgaagtttgttttatatgtatggatatttaattgttttagttttatttgttgataatgattattttttttttattgtagtatttttgtttttttttttaaaatttaattagttaggtgggggggtatgtgtttatatggttattggggaggttgagatgggaggattatttgagtttagggtgtatattttgtagtgagttgagattatgttattgtattttagtttgggtgatagagttagattttgttttaaaaaaaaatttttttaaagaaaaaataattattgttatatatatatgaatttgtttttggattttattttgtttattgatttatttgtttgttattatgttaatgttgtattgttttgattattgtagttttgtaatagtttttaattttagttaatgttttagttttttttaattttgttttttttttaggattgcgttggtttttttatgttttttgtatttttttttgaatttagttttaatttgttagtttttattaaaaaaaaaaaagtttgtagggattttgattgaaattgtattaaatatatatattagtttagaaagaatttacgttttagtaatatggagtttttagtttatggataaggtgtatatatttgtttttgtaggtttttaatttttttttaatggtttatagtttttagcgtattcgttttttatatttttgttagatttttttttaagtattttatatttttgtatcgttataatgatattgtttgtttttatttttaattatttattgttaatatagagagatataattgattttttgggattttttattatggaaagatatatataatagaattttttattttacgtagttttaagtgcgtggtttagtggtattgattatgttattatgttgtgtagttattattagtatttagttttagaatatttttattttttttaaattgaaattttgtttttattaaatatatattttttttttttagttttaggagttattattttttttttgttgttatgaatttcgataatttgagatattttaaataagtggaatgatatagtgttggtttttttgtgtttggtttgttttattcggttttatgttatttatatattgtagtttgtgttagaatttttttttttgtttgttaaggtagaataatatgttattgtaaggatagattatatgttgtttatttttgtatttgttaaggggtatttgggtggttttaattgttgtgaatatgagtgtgtaaatatttggtaagatttgtttttaatttttttttttttttgagatggagttttgttttattatttaggttggagtgtaatggtataattttggtttattgtaatttttattttttaggtttaagtgatttttttgttttagttttttaagtagttgggattataggcgtttattattatatttagttattttttgtatttttagtagagatagggttttgttgtgttgattaggttggttttgaatttttgattttaggtgatttgtttattttagtttttttaaagtgttggatttataggtatgagttatcgtattttgttttagttataagagtagttggtattataggtatatattattatgtttggttaaattttttttgtatttttaagtaaagataggggtttgttatgttggttaggttggttttaaattttcgattttaaatgatttatttgtttcggttttttaaagtgtgggattatatggcgtagttattgattttggtttttaatataaattttaagttagtggagtatgatatagatagatttttaagcgtatacgggaggatgtggttaggcgtggtgtttatgtttgtaattttagtattttgggaggtcgaggcgggtggattatttgaggttaggagttcgagattagtttagttaatatggtgaaattttgtttttattaaaaatataaaaattagttaggggtggtggtagttgtttgtagttttagttattcgggaggttgaggtaggagaattgtttgaatttaggaggtagaggttgtagtgagtttagattatattattgtattttagtttgggtgatagagagaggttttgttaaaaaaaataaataaataaagtatatgggaagatgtatgtagttatatgtaaagattatgttattttatgtagagattagcgtacgtatatattttgtgttttagggtgttggtatttatgtttcgtggatattaagggataattgtcgttgtttttatagatattcgtttatgtatagatgattatattatttgttatagttttatttttttttttaatttagattttttaagtgtatttattttttcgattgtttggttgtgttttttagtattatgtttattagaagtggtgagagtaggtattttggttttgtttttgattttaggggaaagtattagtgtttaagtatgagttatttgtaggtttttataaatgttattatgaggatgaggaaagttatattttatttttaggagagtttttattaggagtgggtgttgaatttggttaagtgcgtttttttgaattgattgagatgattttatgattggttatttttagtttgtttatatgatgaattatattgattttgaatgttagattaattttggatttttggaataaattttttgtggttatagttttaataaattttttgattcgatttgaaaaaattttgtttagaatgagaatacgtggatatagggaggggaataatatatattggggtttggtggggggtgggaggtgaggggagggagagtattaggataaataggtaatgtatgtggggtttaatatttaggtgatgggttgataggtgtagtaaattattatgatatacgtttatttatgtaataaatttgtacgttttatatatgtattttaggatttaaagtaaaatatttttttaatttgtttagaatttttatatttgtgtttatgagggatgttggtttatagtttttttttttttttttttagaaatatggatattttatttagtgaaagagttaggagaagaattggttatagtggtaaagtatattattaaaataattaggaaatatagaataaagaatagtagaaatagtatatcgtgtgtttattaagttgggttgtaaataagagggataggaaagttttttttttatatttttttttcgatgattttatttttaatatttttataagtttttttttttatttgatatatagttttttatttgaaagtagtttaatatgttaatgtgttagataaagtttgtatttaaagattgtttttaaaggaaaggtttatagtttttttataatgtttttatgtggttttgaaatcggggtaatattggttttagaggaagagttgaaggtgtttttttttttttagttattgttggaagggtttgtgtagagttgatatattttttttttaaatttttggtagaattt

SEQ ID NO: 2333 - DNA, 1216 bp, Artificial Sequence
  chemically treated genomic DNA (Homo sapiens)
  unsure 9, 158: n is a or g or c or t
gttttgcgntcgttttttttttattatgtaaattaagtttagtatagtgtttggtatatggtacgtttttaacgtcgtggatatgattatatttattttatatataaggaaaatgaggttggaagagtttatataggttttagtgtaagtagtagagntaggatttgaattaaattgtttcgtattagggagaattttttggcgtttaaaagtattagtgaggagaggagaaagttttaaaaagtaagattaaagaaaaaagtaattatttgtttgtgtggaagttgaggtggaagaagggttttatggaaattttttttgatgaaattatttttcgtttttgaatagtaattttggtttttttagtttttgtgtgcgttgttggtgtaggtgtgttattttttttattttgtagatgagtaaattgaggtatataagttatatgagaaagtaggagatagaggattggaatatgatatttcgaataaagaatgttttagtttttgggtaatcgtagggagtcgttgagaaataagttttttcgggagtagatttttagttcgtttaaattttttttattttatatcgtgtttggagggaggaaaaaaaaattttttttttttagaagtaaagtttcgtaattttttagttttttttagagataggaaaggaaatttagcgggattatatttttcgacgatttttgcgaattttgcggaacgtaggcgttttgaaacggcgtgtgtattacgattttcggtagtcgcgggcgggtgcgggattatattttttagggggtagaggtaggggcgggagggggcggttttcggcgttgttttcgtttttttttcgtgttcgcggggagaggtaaataaattacgcgcgggttgttcgcggtacggcgggcgcggttggcgcggttggggcggtaggggcggcggagagcgcgtcgagtcgcggtcgagttggttcgttcgttcgtcgtatatgtttcggaacggcgttcggtcgtagtcgtttgcggcgttttttgtcggttcgagaagggagtgcggagaggcgtcggtcgttattcgcggtgtttatggagcgggtgaagatgattaacgtgtagcgtttgttggaggttgtcgagtttttggagcgtcgggagcgaggtaatggttgggcgtcgttgcgtgagttcgagcgttattaatttttttcggtagtgcgg

SEQ ID NO: 2334 - DNA, 1216 bp, Artificial Sequence
  chemically treated genomic DNA (Homo sapiens)
  unsure 1059, 1208: n is a or g or c or t
tcgtattgtcgaaaaagattagtagcgttcgggtttacgtagcggcgtttagttattatttcgttttcggcgttttaaaaattcggtagtttttagtagacgttgtacgttgattatttttattcgttttatgggtatcgcgggtggcgatcggcgttttttcgtatttttttttcgggtcgataggaggcgtcgtaggcggttacggtcgggcgtcgtttcggaatatgtgcgacgggcgggcgggttagttcggtcgcggttcggcgcgtttttcgtcgtttttgtcgttttagtcgcgttagtcgcgttcgtcgtgtcgcgggtagttcgcgcgtggtttgtttattttttttcgcgagtacgggggaggggcgggagtagcgtcgggggtcgttttttttcgtttttgtttttgttttttgggaaatgtagtttcgtattcgttcgcggttgtcgggaatcgtagtgtatacgtcgttttagggcgtttgcgtttcgtaagattcgtaaaggtcgtcggaaggtgtagtttcgttgggtttttttttttgtttttagggaagattaagaagttgcgggattttgtttttgggagggaagaattttttttttttttttttagatacgatgtggaatgggaaggatttgagcgagttgggagtttattttcggggaaatttgttttttagcgattttttgcggttgtttaggggttgagatattttttattcgaagtattatgttttagttttttattttttatttttttatgtaatttatgtgttttagtttgtttatttgtaaaataagaagagtaatatatttgtattaatagcgtatatagaaattggaaaagttaaaattgttgtttaaaaacgagggatgattttattagagagggtttttatgaagttttttttttattttagtttttatatagataagtagttatttttttttttaattttattttttaaaatttttttttttttttattagtgtttttagacgttagaaaattttttttggtgcggaatagtttggtttaaattttgnttttgttatttatattgagatttgtgtgaatttttttagttttattttttttatgtataaaatggatatgattatatttacggcgttgagggcgtgttatgtgttaggtattgtattagatttagtttgtatagtaagagagaaacggncgtagaat

SEQ ID NO: 2335 - DNA, 1284 bp, Artificial Sequence
  chemically treated genomic DNA (Homo sapiens)
ggattcgggagggagtgaaagtttcgttggggtttttattagtgagcggtgatggttgtcgtttatttgtattgaagcgttttttgttattaataagttaaattagagatgttatttatttaagaagaaggaaaaaaaattttagttaaatagtttatgaatatatatgtttatattttttatttttttaatttttaattttttcgtttttagagggtatagttgtaaattttgacgaaaatttaattttttgtgcgggaatttttttttatcgtttgtcgttttcgcgatagtgagtgggagttggaggagttttggtttcgttgttcgggagtacgcggacgcgggcgatcgcggtgtttagttagggaggaggggaggcggcgggattgggcgcgggtcggcggtcgcgattcgggagcgggtttgtttaggaaaaggttcgtcgttttttaaatttttttttggtcggttttttgtcgggtttttcgggtttggtgttagggtatcgcggggagcgtcgaatgggagcgacgattcggttagttcggtattcgcgggcggtagttagggcgacgcggaggcggcgggtagggggtgcgtattgtaggggcgttagatttggcgggagggggagtgtttaaagttttttgtttgatggtatttttgtttatagagtttatattttaatattaatttgttttttttttttttttttttttttttttcgtgatttttttttattttttttttttgagaaatttcgttttagcggtgcggagcgttttgcgtagtcggggaggtacgtacgtaggtaggcggcgggtagcgggaggcggtagttcggtcggttttcgcggttttcgcggagtttcgtcgttcgtcgcgttatggttcgaagatttcggtataggtaacggggagtcgggcgggcggtcgagggcggggttcgggggtcgcggggcggggggttaggttttcgggagtaggtgggaattcgtttcgggattatttgaggggttgttagatttttcgaggatttggagtttttgtttcggtagtagaagtcgttttagagattgatgaatggaagagtttttgcgggaaatgtattcggacgttgggaagtacgttttgcggtttattttgtaagttgtatggggatatatttttttttagggggaaaaagaaagtacgttttagtcgagggtagagcggtgtttattagtttcggggagtttattaggtgtttggtttgatgtcgcgggtgtcggcgagggattt

SEQ ID NO: 2336 - DNA, 1284 bp, Artificial Sequence
  chemically treated genomic DNA (Homo sapiens)
ggatttttcgtcgatattcgcggtattaagttaggtatttggtgggtttttcggggttggtgggtatcgttttgttttcggttggaacgtgttttttttttttttttaaagaaaaatgtatttttatgtaatttgtaaaatgagtcgtagggcgtgttttttaacgttcggatatatttttcgtaaagatttttttatttattagtttttggagcggtttttgttgtcgaggtaggggttttaggttttcggagggtttgatagttttttagatgatttcggaacgaatttttatttgttttcgggagtttggtttttcgtttcgcggttttcgggtttcgttttcggtcgttcgttcggtttttcgttatttgtgtcggggttttcgggttatggcgcggcgggcggcggggtttcgcgagagtcgcggggatcgatcgggttgtcgtttttcgttgttcgtcgtttgtttgcgtgcgtattttttcggttgcgtagggcgtttcgtatcgttggggcgaagttttttaggagaaagaggtaggaggaggttacggaggaggaggagaaggaggaggaggaaataggttgatattaaagtgtaaattttgtaaatagagatgttattaaataaagagttttggatattttttttttcgttaaatttggcgtttttgtagtgcgtattttttgttcgtcgttttcgcgtcgttttggttgtcgttcgcgggtgtcgggttggtcgggtcgtcgtttttattcggcgtttttcgcggtgttttagtattaggttcgggaggttcggtagggagtcggttagggaggggtttggggggcgacgggtttttttttgagtaaattcgttttcgggtcgcggtcgtcgattcgcgtttagtttcgtcgtttttttttttttttggttgggtatcgcggtcgttcgcgttcgcgtgttttcgggtagcgggattagagtttttttagtttttatttattgtcgcgggggcggtaagcggtggggggaaattttcgtatagaagattggattttcgttaaggtttataattgtgttttttggagacggggaaattaggagttggaggagtaggggatgtgagtatatgtatttataggttgtttggttagggttttttttttttttttttaaataaataatatttttaatttaatttgttagtgataaaggacgttttaatataagtgggcggtaattattatcgtttattaatggaggttttagcggagtttttattttttttcggattt

SEQ ID NO: 2337 - DNA, 1541 bp, Artificial Sequence
  chemically treated genomic DNA (Homo sapiens)
ttgtagtttgggcgatagagcgaggttttattttaaaaaaataaaatagaaataaaataaaataaaataaaataaaaaatttgttataggagtggggaggtcgatttttgaagaaaaacggagtattcggtaatattagtgttttaatgtttttgaatttatgtagattttttttgttagagggttttagtgttttaggttaatgggttaatttgatatttagaatattttttttatattagttttttatatatttaagtttttaggtgttgagatatgattttttttatttcgttttttttattttttatttttgaaaatacgggtggaattttaattaaagtttattgtgttggtattttagtaatattatatattaatatttttaagaattaaggttacgtttttatgtaagaaaatattatttaatgacgtttttatattataatatttatataaaagtttggttattttaataaagagattatagattttagaatttataaataggaaaatatttttttcgggttatttttggaaattttttttaaatatcggagtttttttttaatttaagtttttttttattttttttttaggggatttgttgaagggtgttgtatgtttttttgtgggagagtaaattttatagttaggataaaataaataaataaataatatttaaataatatttaggttaacggtaatttttatttttttttaaagttttaatttttcgtatttaaagttttgggttatttttgtgttgtaaggattttagaatcgaaatggagggatttgataattttatttaattaaatttaaaattttgtttttattatttattagttattaaaatatgtaaattgttgattaaggaaggttgggtagtaggagcgtttgcgaaggcgtagggtagaagtgtgaaaagaaattttagtttttttagggagattgcgtgtgaaagagttcggtttttttaaaagttttaggtcgcgttttgtaggttttcgtatttgttttttttgttttttttatttttttgatgttcggtattatttgtggtcggcgtggtggaaggatatagtgaggtttttattttcgtttttcgtttttcgtttttattttagttttattaaaacgaattcgggttagcgtaaggattttcgagttgcgagtgtgttgaggttgggattgttatttatttttcgattagcgcgtgaatcgagttcggttcggttggcgagaaataattttgtaaaaataattatatttagtttggtaattgtttgtttttaggtttgtcgtttagtcgtcgtttatattcgttgtaggggggggggtatagaatttatcgcggtaagaatattttttttagttagtagattataatgttgtaaattaaggattttatttggattttgttttttttgggaattgtaggtatatttttttttttttaaatttttaatttggtttgttaattattttttttttttatttttaggaggaacgttaattaatttgggtggtttacgtgg

SEQ ID NO: 2338 - DNA, 1541 bp, Artificial Sequence
  chemically treated genomic DNA (Homo sapiens)
ttacgtaaattatttaaattaattagcgttttttttaggagtaggaggaaggggtaattagtaaattagattgagaatttaaaaaaaaaaaaatgtatttgtagtttttaggaaaaataaagtttagatgagatttttagtttgtagtattgtaatttgttggttgggagggatgtttttgtcgcggtaaattttgtgtttttttttttgtagcgagtgtggacggcggttgagcgatagatttaggggtagataattgttaggttgagtatgattatttttgtagaattgtttttcgttagtcgagtcgagttcggtttacgcgttgatcggagaatgagtgatagttttagttttagtatattcgtaattcggagatttttgcgttggttcgggttcgttttgatggaattgggatgggagcgaggagcggggggcgggggtgagaattttattgtgtttttttattacgtcggttataaatagtgtcgaatattaaggaggtaagagagataggggaggtagatgcggaagtttgtaaaacgcggtttggagtttttgggggagtcgggtttttttatacgtagtttttttgggagagttgggatttttttttatatttttattttacgttttcgtaggcgtttttgttatttagttttttttaattagtagtttgtatattttgataattagtaaataataaaagtaaaattttagatttggttaggtaaagttgttaaatttttttatttcgattttaagatttttgtaatataaggatagtttaggattttaagtgcgggaaattagaattttggagagggatgggggttgtcgttggtttgggtgttgtttggatattgtttgtttgtttgttttattttaattgtgaagtttgtttttttatagagagatatataatattttttagtagattttttgggaaggaggtgggaagagatttaagttagaagaaaatttcgatgtttggaagagatttttagaaataattcgaagaaaatgtttttttgtttataaattttgaaatttgtggtttttttattaaaatagttaggtttttatataggtattatgatatagaagcgttattaaataatatttttttatatggggacgtgattttaatttttaaagatattaatgtataatattattgaggtattaatataataggttttaattaaaattttattcgtgtttttaaaagtagggggtggagaaagcggggtgaaaagaattatgttttagtatttgaaggtttgggtatgtaaggaattaatgtgagaaaggtgttttagatgttaggttaatttattagtttagaatattgaaattttttaatagaggaagtttgtataagtttaaaggtattaaagtattaatgttatcgggtatttcgtttttttttaaaggtcggtttttttatttttgtagtaggttttttgttttgttttgttttgttttgtttttgttttgtttttttgagatggagtttcgttttgtcgtttaggttgtag

SEQ ID NO: 2339 - DNA, 2400 bp, Artificial Sequence
  chemically treated genomic DNA (Homo sapiens)
aagtttgtgtttttagagaggaagtgtttttattttgagttttttttggttttgatttatatataggtagacgtggattttgttttgagtaggtgaatcgttagtttagtggaagagtagtttttttttttttagttttttgattttttttagttgttatggtaattgagggagtagtgttttgagaatgatattattgaaatttagcgtttaattttgaaatggttcgggtaagggacgttggatttaaaataggaggggattagattgtaaggatttagttttagttttaattttttgggatttattttttatttagtttgtatgttggattatttttattattattaaaattattattatttgtttggtaattgtttttttgagtatttattatatgtttagtattatgttaagggttttattagtattattttattgtgtatatttttacgatatttttagggtttatttatggtttaggaaatagggttttgaaatttgtttttgtggtaggttaggaagtggtagagtttggggttggtggtatttttttaggtttttttttagtatgtggaagatagtatagatttttaggtattttcgttagtttattttttattttttttttttttttttattttttatatttttttttttgtttttaaagttatatatttttttttttgttggatgtgtaagacgatttgaaaagtatttattagtgataaagggggtggtggtttttttttttgttttttttttgcgtaattcgaagtttgagtgggtttgtttcgtttggtaaggttggggaggaggaaaagattaaattatttagagttaggtgttaagtgtgtgtgtgtgtgtgtttgtgtgtgtgtatgtgcgcgtgtgcgcgtgcgcgtgtgtgtgttttttttttttttgattttttttcgtttttttaagattgtgtgagtagtagtaatagtaacggggagatgtaaaattttttgtaatttgtttaggaaaagatagattttgagtcgggtttatatggttatttatatgttagggtttttaagaaaggaagggaagttgcgttttttgtgtttttttttttttagtttagattttggtttttttatatttgtggggtttttaggttatagatgaatatgtgttttttattttttattttttttagatgttaggtttgagtgtggttttagaaaagattagaattaggtaatattttttgaataggttgttttttttcgtttgtttattcgagagttaaggttagaatttaggttgtaatttttgcgggtttttgggaggggtttttagtattgtttagtttgggaggttgtgtgttttattgttttattaaggaatgttattttaatattgatgtagaggtagaaataattatttttgttttttatggggttttttttgtttaaatagatttgttttgttttgcgtggttattatatttagttttatttaggtttttagaaattgttattgtgtgtgtgtgtgtgtgtgtgtgtgtgtgtgtgtatgtgtgtgtgtgtgtgtgtgtgtgtgttttttgatagaaaaaaaaaaatggaaattaggttatataaaagatgtatgttttggagtttagagcggtttttttaatgagggttgcgacgtttttttttttatatttataaattagtcgggttggacgttattgttaattcgttttagtgatgataggataaaggagggatattaagaaataaatttttttttacgattttcgttgagtttacggtttagtttttatatatttatgtcgcgtttttagtcgttgggtgaggagttatttagcgtcgcggttttttcgaggggcggtcgggtagcgagtagcggtcgagcggacggggtgagttaggggcgcgcggggtttagtattgcgtcggggaagttcgtagttttcgtttcgaatttgggttcgttgaggttgagggaggggacgtaaggggagggaagaagagaagggaggagtgggggttaggggagagggggtggggagggattttggaggtataaagcggaggggaaggggagggacgcgcgcggtttttattaggaggcgagtgggtgtaatcggcgttttttagtcgcgcggggcggcggattcggaggatttagaattcggagcgcggcggtcgcgggcgttcgggaggaagaggaggagtacgaggcgggcgggcgggtgcgtacgcgaagaggtagtttcggcgttcgcggttcggcgttaggtgagtttttgatttaggcgtttcgcgtttttttttcgtttttagggtttttcgttttcgttcgagtttttggtgtgcgcggaaggttcgggttttgttgcgcgttttaatttggttcggg

SEQ ID NO: 2340 - DNA, 2400 bp, Artificial Sequence
  chemically treated genomic DNA (Homo sapiens)
ttcgaattaagttgggacgcgtagtaaagttcgagtttttcgcgtatattaggggttcgggcgggagcggggagttttggggacggagaaggggcgcgggacgtttggattaggaatttatttgacgtcgagtcgcgagcgtcgaggttgttttttcgcgtgcgtattcgttcgttcgtttcgtattttttttttttttttcgggcgttcgcggtcgtcgcgtttcgggttttgaatttttcgagttcgtcgtttcgcgcggttggagggcgtcggttgtatttattcgttttttggtaggagtcgcgcgcgtttttttttttttttttcgttttgtgtttttaagatttttttttatttttttttttttagtttttattttttttttttttttttttttttttttgcgtttttttttttagttttagcgaatttaagttcgggacggaggttgcgggttttttcggcgtagtgttgggtttcgcgcgtttttggtttatttcgttcgttcggtcgttgttcgttgttcggtcgtttttcggaggagtcgcggcgttaagtagttttttatttagcggttggaaacgcggtataaatatgtagggattgagtcgtgagtttagcgagggtcgtgagggggaatttattttttaatgttttttttttattttattattattgaaacgaattagtagtgacgtttaattcgattggtttatgggtgtggggagggagacgtcgtaatttttattaaaagagtcgttttgggttttaaagtatatattttttatataatttaatttttatttttttttttttattaggaaatatatatatatatatatatatatatatatatatatatatatatatatatatatatatatataatgataatttttgggagtttggatagggttgaatgtagtagttacgtagggtagggtaggtttatttgggtagagaaggttttatgggaggtagggatggttatttttgtttttatattagtgttgggatagtattttttaatgggatagtggaatatatagttttttaggttgggtagtgttgggagttttttttaggagttcgtagaggttgtagtttgggttttggttttggttttcgggtggatagacggagaaaagtagtttgtttaggaaatgttgtttggttttggttttttttggagttatatttaggtttggtatttggggagagtgaaggatggagggtatatgtttatttgtggtttgggagttttataggtgtggagaggttaaggtttgggttggaggagggaagatatagagaacgtagttttttttttttttttaggggttttaatatatgggtaattatataaattcgatttaaaatttgtttttttttgggtagattgtaaaggattttgtattttttcgttgttgttgttgttgtttatatagttttgggaaaacgggggaaaattaaggaaagagaggatatatatacgcgtacgcgtatacgcgtatatatatatatataaatatatatatatatatatttggtatttggttttgggtgatttgattttttttttttttttagttttgttaagcggagtaaatttatttaggtttcgagttgcgtagagaagaggtaaagaggaaaattattattttttttgttattaataaatgttttttagatcgttttgtatatttagtaggggagggggtgtgtgattttgggggtaggaagaagggtgtgggggatgaggaggggaggaaggaataaagaataagttgacgagggtgtttggaggtttatgttgttttttatatgttggaaggaggtttggagaaatgttattagttttaggttttgttattttttggtttgttataagggtaagttttagagttttgttttttgagttatggatgggttttggggatgtcgtgaggatatatataatgagatgatgttggtgaagtttttgatatggtgttagatatatagtaaatgtttaaggaaatagttgttaaataaataatggtgattttgatgatgatgagaataatttagtatataggttggatggggggtgggttttagaaaattgaggttggagttgagtttttgtagtttggtttttttttgttttgggtttagcgttttttgttcgaattattttaaagttgagcgttgggttttagtggtgttatttttagaatattgtttttttaattattatggtaattggggaaaattaggaagttaggggaagggaagttgtttttttattgggttggcggtttatttgtttaaaatagagtttacgtttgtttatgtgtgggttaaggttaaaagaagtttagagtaggggtattttttttttgggagtataagttt

SEQ ID NO: 2341 - DNA, 579 bp, Artificial Sequence
  chemically treated genomic DNA (Homo sapiens)
ttcgatttagggcgtggaagaaagaagaggaaaggaaatggtaggataattaatacgggatattataattttaagaaatatatatatatatatatatatgtatttttttattgaatgatgtgggtcgtattgatataataggtttgagattttttataggtatgattgtgttttgtttttgtggtttttaaagtttttagaataattttgatgttataggtggtatttaaaatttattttttgttggatttggtagagacgtttttagttcgttaggtttttcgttgtagtttcgtagtttgatcgtaggggacggaatttgcggcggtttggaaaattggcgggcgcgaggcgtcgtttttttttgggttagatttttagtttttagtttttcgttttcggttttcggcgttcggcgttcggcgcggagttgttttttaaacgatacgtagtcgaggtgggtgggtgtggggacgcgggagttagtgtcgtcggatcggttcgtagttcgttgttttgttgagttcggaggtcgtttggatggagtcgtcgttttcggtcggagtttagtcgtttgtt

SEQ ID NO: 2342 - DNA, 579 bp, Artificial Sequence
  chemically treated genomic DNA (Homo sapiens)
ggtaagcggttgggtttcgatcgggagcggcggttttatttaggcggttttcgggtttagtaggatagcggattgcgggtcgattcgacgatattggttttcgcgtttttatatttatttatttcggttgcgtgtcgtttgaggaatagtttcgcgtcgggcgtcgggcgtcgggagtcgggagcggggagttgggagttgagaatttgatttaagagagagcggcgtttcgcgttcgttagttttttaggtcgtcgtagatttcgttttttgcggttaaattgcggaattgtagcgagagatttgacggattgggggcgtttttattaggtttagtaaggaatgggttttaaatgttatttgtgatattaaaattgttttgaggattttgaaggttatagaaataaaatatagttatatttatgggagattttaaatttgttgtgttaatacgatttatattatttagtaaaaaaatatatatatatatatatatatatattttttaaggttataatgtttcgtgttggttattttattatttttttttttttttttttttttacgttttaaatcgga

SEQ ID NO: 2343 - DNA, 815 bp, Artificial Sequence
  chemically treated genomic DNA (Homo sapiens)
gagttttaggattgagatatttttattatattttttttattattttgtatttttaaaatagtttttagggtatttttatttgtttttgtggaaagattggtaattagaggtagaaaagtgaaataaatggaaatagtattatttagggttgttatatttatatttgtgtttttgtagtgttaatttgtattttttgagtgagttatttttatttatttttatagtagttagtatcgtagtgttttgtatatattatatttttaatgagtatttgttaattgattttgtatatgcgtgtgatagtataaatatattatgaaaaatgaggaggttaggtaataaaagagttaggattttttttaaaaaaaatatatagcggtggagtttggtataaagtttaaatgtttttatattttgttttgtagtatttttaattaggggattttgataaggaagttgaagggtgatattatttttgtttttttattgtaattgaatatattttttagtttttaggtggttttcgttggttaatttgttgtggagtttttaagggtatagaatcgttttttatataattaaaagaagatgttgtttaatttgaggattttgttaaataatgtagtttttagaaatggttataattttatggttcgaaattttcggtaagtgatggttagagatttgggtttgatttaggaattatggtgatgtataaaattatattttgtagtaaggtttttttttgtagaatgtagtgttacgttttgttttatttttatttgagatagttgtttttaattttagtaaagttt

SEQ ID NO: 2344 - DNA, 815 bp, Artificial Sequence
  chemically treated genomic DNA (Homo sapiens)
aagttttgttggaattagaggtagttgttttaaataagagtaaagtagagcgtggtattatattttgtagaaagaggttttattgtagaatatagttttatgtattattatgatttttaaattaaatttaagtttttgattattatttatcgaaaatttcgaattatgaagttgtgattatttttaaaagttgtattgtttaataggatttttagattaaatagtatttttttttaattgtgtaaaggacgattttatgtttttgaaaattttatagtaagttagttagcgggggttatttaaaaattaagaaatgtgtttagttgtagtgagggagtaaaggtaatattattttttagtttttttattaaagttttttggttagagatattgtagggtagggtgtaggagtatttgaattttatgttaagttttatcgttgtgtattttttttggaagaaattttgatttttttattgtttggtttttttattttttataatatatttatattgttatacgtatgtataaaattaattgataagtatttattgaggatataatatatgtaaggtattgcggtattggttgttgtgaaggtgagtagaagtaatttatttagaaaatgtaaattggtattgtaaaaatatagatgtagatgtgatagttttgagtagtattatttttatttattttatttttttatttttaattgttagtttttttataaaaataaatagaagtgttttggaagttattttgggggtgtaagatgatagagaaggtatagtaaaaatattttagttttggggttt

SEQ ID NO: 2345 - DNA, 1791 bp, Artificial Sequence
  chemically treated genomic DNA (Homo sapiens)
atcgagttagtagcgggcggcgtttagtcgcgttcgtagtttttttttttttttagtcggggagagttagtttcgttttttatattttttgtcgttagcgatttgtagtttcgtattgttttttttttttgtattttttttttagttattcgagggtttagaaattaagtttttcggttttttcgttattcgttgggttttatcgaggtaggtgggtattcgtcggaggtttttagttcgattttgaattaagcgttttggattgtttagattcggtgggtaaggggattggggaggttttgcgtatagtcgcgtggaacgggaggggataagataaattgttggatattttttcgtggaatgagaagtggggggtgcgtgggtgggaaggtattttcggagggaaaggttaaagggaaggattagaaagagaggaaggaagagtcgggaaggaacggaagggaatttagagtcgagggtggtggggttggggttagggatgcgtattgggttcggggtcgcgcggtttaggcgggtattggttagtggatggtagggttgggcgagttagaattgagagttcggttttatagcgtagcgcgtttcgaggttttttgtcgttatttgaatatttattagattgatcgttttttatttttatttaacgtttattttatcggcgagtttcgttttttagtgtagttttaatttcgggtttttattttttttttttcggttcgttttttttttttttttttttttcgtcggttgtttttttttttttttttttttattttttttttttttgttttttttttgtcggtatcggagtgataggttcggggtttttttcgtcgaagttcggggttttagcgttggcgaattatagagtggtggaatttattgtttttgtttgataagttatttatttttcggcgcggggagggggaggaggtttggagggggttttgtagtttttagagagatatatatcgggagtcgaggttttagttttcggtcgagttttttagtagtcgtaatttatttggggttagtttagagttgttagcgtcgttcggttttttttttttttttcggtttttcggtcgcggcggcgtgcgtttgtttttttcgggggcgggggtttggttcgcgcgtttttttttcgtaggcgttatttcggatattttcgggattgttatttttttgttaatttcgttaattcgttagtatttggagaggttcggtttttttttcggcgttttttgatcgttttcgtttcgcgcgtttttcgattatcgtttttcggatgaataggttttaggggagttgagcgagtcgtttttttcgtttagttttagttttggttgtagttgtagcgcgagttatgcgtttttagtgtatttcggttcggtttatcgtttcggggttattttgttgatcgtttagtttcgagtttcgatagtggtaagttgcggttattgcggttgtaagtttcggttaattcggaggagttttagcggggagcgtagtgttgcgtttttcgttttcgcgcgcgtcgtagtagtcgggcgtttatttatttttttttttttatcgttttttttttttttttttaagttttgaagttgagtttgagaggcgatacggcggcggcggtcgcgttgttttcgtttttttgtttttttatggatatgtattgtaaagtagatttttttttcgcgatgtatcgtgagtattcgcgttcggtttttgtttcggttcgggtttttcgttttaattttgtttagt

SEQ ID NO: 2346 - DNA, 1791 bp, Artificial Sequence
  chemically treated genomic DNA (Homo sapiens)
attggatagggttgggacggagagttcgagtcgggataggagtcgggcgcgggtatttacggtgtatcgcggagaaggggtttgttttgtagtgtatatttatggggaggtagaggagcgggagtagcgcggtcgtcgtcgtcgtgtcgttttttaaatttaattttaggatttgaggagaaaagggagggacggtgggggagggaggatgagtgaacgttcggttgttgcggcgcgcgcgggggcggggggcgtaatattgcgtttttcgttggggttttttcgggttggtcggagtttgtaatcgtagtagtcgtaatttgttattgtcggggttcggggttgggcggttagtagaatggtttcggggcggtgggtcgggtcggggtgtattgggggcgtatggttcgcgttgtagttgtagttagggttgaagttgggcgggggaggcgattcgtttagtttttttggaatttgtttattcgagaggcggtggtcggagagcgcgcggggcgggggcggttagagggcgtcgggaggggagtcgggtttttttaagtgttggcgagttggcgaagttggtagagaagtagtaatttcggggatgttcgaggtggcgtttgcgggaggggagcgcgcgggttaggttttcgttttcggaaaaggtaggcgtacgtcgtcgcggtcgaagggtcgggagggagggagggagtcgagcggcgttggtagttttgggttggttttaggtgggttgcggttgttagaagattcggtcggagattggagtttcggttttcggtgtgtgtttttttaaaagttgtaaagttttttttagatttttttttttttttcgcgtcgggagatggatgatttgttagataaaggtaatagattttattattttgtgattcgttagcgttggagtttcgagtttcggcgaggagggtttcgagtttgttatttcggtgtcggtaaggggagggtaggggagggagaaatgggagggagggagggagggagtagtcggcgaaggaagagggagggaggggagcggatcgggggagggggaatgggagttcgggattaaaattatattgagaaacgaaattcgtcgataagataaacgttagataaggataaagagcggttagtttaatgaatatttaggtaacgatagagggtttcggagcgcgttgcgttgtgaagtcgggtttttagttttaattcgtttagttttgttatttattggttagtgttcgtttgggtcgcgcggtttcgggtttagtgcgtatttttagttttaattttattattttcggttttgagttttttttcgttttttttcggttttttttttttttttttttggtttttttttttggttttttttttcggaggtatttttttatttacgtattttttattttttattttacggaaaagtgtttagtagtttgttttgttttttttcgttttacgcgattgtgcgtagggtttttttagtttttttgtttatcgggtttgggtagtttagaacgtttggtttagaatcgagttgaagattttcggcgagtatttatttgtttcggtgggatttagcggatggcgggagagtcgggggatttggtttttgaattttcgggtgattgggaagggggtataggggagggaaatagtgcggagttgtaggtcgttggcggtagaggatgtgggagacgaggttggtttttttcggttggggagaagaggaggttgcggacgcggttgagcgtcgttcgttgttagttcggt

SEQ ID NO: 2347 - DNA, 1790 bp, Artificial Sequence
  chemically treated genomic DNA (Homo sapiens)
agggaggcgaaatttatttagtttagcgtatcgttttttttcggcgtgggagtcgtttagttacgtttagatttcggttttcgcgcgcgttttttttttatcgcgttttgattgcgtttcggtcggaggtgttttgtgcgttttacggattcgacgcgggaggtttagaattcgggggatttttatcggtggttttttttttttttattttttcgatttttcggtttaggcgcggttttttcggcgcgggagtgggggattggggggcgcggggttttagggtggggacgaggcggttgtaggtttttttttcgattggagttcgtttttaagtggaaatgtgggtggagggtttttatttagatgttttaggtttcggattttgggcgggggcgcgtggtagtcgtaggtgagtgttttaaattcgtttttttttttttttaaagattgattttttttttttttatggagagaggaaggttggggtttggattcgaatcgtggagagcggtcggagcgcgggcggggcggggacggttttttggttttttttggcgtaagttttgggcgttgcgttgtcgcgtgggttcgagagaggcgagtcgcgacggcgtttttgcggcggttttttttttttttattcggtgtcgtagattgtagttggtattggagggtgggtaagttcgagggaggggcgcggagcgcgcggagcgcgcggggttttgatggatttagttgtttgcgcgagcgcgtgtgtgttttttgtcgcggcggcggcgttcgggttttgtcgggttcgtacgaatttttagcgttttcgaggtgcgggttttaggttcggaattcggggaggcgggggggggggggcgggggcgggggcgggggaggggcgcggcggcggcggttataatttttttttcgtcgtcggtcggttttatacgcgcgttttgcggagttcgtttaatttcggcgagtcggtttgcgtttattttttttttttttttttcggcggcggttgcggcggaggcgtcgattcggttttgcgtcgtttttaggttcgcgcggtcggcgtagcgaggtttcgggcggcgggtggtggttgttaggcggttcggtcggtcgcgcgttgttcggtttcggtcgagcggagggcggacgtcggcgtcgggagtcgagggtcgtcgcggagggggtgttgcggtcgcgttgtgttcggtcgggcggcggttgtaagaggaggtcggaggcgagcgcggggtcggcggtgggcgcgtagggcggttcgtagttcgtagtcggggtcgggttaggcgtttaggtaggtgatcggtgtggcggcggcggcggcggcggttttagatttttttcggagttttttttcggggttcgatgttcgtaaatatggtagaatgtatcggtcgggtcgtttttgaagttagcgcggggagcgagcgcggcggcggttagtatcgggaacgtatcgaggaagaagtttagttttcgtttttcgtttttttcgtttttattttttatcggcggtttaggaggtttttcgcgttggcgcgtattttttgttttttttttttttggttggcgttgtttgttttttcgtatttattgttcgcgtcgggcggtttcgttagtttcgtgtttttcgcgttattttttttcgggtcgcgttttttaagggatggtattgaatttcgtcgttataggagatcggttggagcgtcgtttcgcggtttcgtttttttttcgagtagttagcgtttcgggacgcgatgaggatt

SEQ ID NO: 2348 - DNA, 1790 bp, Artificial Sequence
  chemically treated genomic DNA (Homo sapiens)
ggtttttatcgcgtttcgaggcgttggttgttcggaggagaggcgaggtcgcggggcggcgttttagtcggttttttgtggcggcgaaatttagtattattttttagggagcgcggttcggaggagggtggcgcggggagtacggagttggcggagtcgttcggcgcgagtagtgagtgcggagaggtaggtagcgttagttaggaggaggagaaatagggagtgcgcgttagcgcggggagttttttgggtcgtcggtagggggtggggacggaaggggcggagggcgggggttgggtttttttttcggtgcgttttcggtgttggtcgtcgtcgcgttcgtttttcgcgttggttttaggagcgattcggtcggtatattttgttatatttgcggatatcgagtttcgaagaagaatttcggagggagtttggggtcgtcgtcgtcgtcgtcgttatatcgattatttgtttggacgtttggttcggtttcggttgcgagttgcgagtcgttttgcgcgtttatcgtcggtttcgcgttcgttttcggtttttttttgtagtcgtcgttcggtcgggtatagcgcggtcgtagtatttttttcgcggcggttttcggttttcggcgtcggcgttcgtttttcgttcggtcggggtcgggtagcgcgcggtcggtcgagtcgtttggtagttattattcgtcgttcggggtttcgttgcgtcggtcgcgcgggtttgagggcggcgtaaggtcgagtcggcgttttcgtcgtagtcgtcgtcgggagaggaggaggaggagtaggcgtaggtcggttcgtcggagttgggcgggtttcgtagggcgcgcgtgtggagtcggtcggcggcggggagagggttatagtcgtcgtcgtcgcgtttttttttcgttttcgttttcgttttttttttttcgttttttcggatttcgggtttgggattcgtatttcggaagcgttaggggttcgtgcggattcggtagggttcgggcgtcgtcgtcgcggtagggagtatatacgcgttcgcgtaagtagttaaatttattaaagtttcgcgcgtttcgcgcgtttcgcgtttttttttcgagtttgtttattttttagtgttagttgtaatttgcggtatcgggtggggagggaggaggtcgtcgtagaagcgtcgtcgcggttcgtttttttcgggtttacgcggtagcgtagcgtttagagtttgcgttaaaaagggttagagagtcgttttcgtttcgttcgcgtttcggtcgttttttacggttcggatttaggttttagtttttttttttttataaaaggagggggagttagtttttggggaaggaggggggcgggtttggggtatttatttgcggttgttacgcgttttcgtttaggattcgaggtttggggtatttgaatgaggattttttatttatatttttatttgggagcgagttttagtcggggaaagggtttgtagtcgtttcgtttttattttgggatttcgcgttttttagttttttattttcgcgtcgaaggggtcgcgtttgagtcgggaagtcgaggggatggaagggaaaggagttatcggtgagggtttttcgggttttgagtttttcgcgtcggattcgtggggcgtatagagtattttcggtcgaggcgtagttagagcgcgatgggggaggaacgcgcgcggaggtcgaggtttgagcgtggttagacggtttttacgtcgagaaagggcggtgcgttgggttggatggatttcgttttttt

SEQ ID NO: 2349 - DNA, 1438 bp, Artificial Sequence
  chemically treated genomic DNA (Homo sapiens)
ttttttggttttgttattgtttaagttagtttacgttaagggtgttttttgttttttattttttttgttattttcgttttagtttcgttgtattttaagtttagtttgttttagtagtaggtttttttgataaatttgtaattttggggaaaagttagtttaagaaaggtagggggtttagatttatgttgtgtggtaaaagttttttttgatggggtaagggtaggattggaaaagtagagagatttttttggatgttttgggagagtagttttttgggtggtgggtggaggttggaggtagggaggaatttttttatagtgagaagggtttttaaatttaggcgagatagagggagggttaagaacgttaaggtaaatgttatttgtgttttgttttttttttaaagaaattaaataaagcggtcgcgttcggtggttttttaggaaggtcggttattttttgaggagatattaggttagtttaggttttattgttttcggtttttagttatggttgttattatttgattagcgttatagtcggtttttttgtaggcgtcgggagaagtgattagagtaatttttgttttttatagggcgggttttttaacggtgatttgtgggtagtgttttttgttgagcgagttatggttcgaaggtagaattaattgtgtttgtagtttttatttttaggatgtagtcgaggtgggtttaaggggttacgatgtggtttggagttttgttgatttttttgttttgtgagtgtttattttgtttttatattattttaattttatgagtatcgaagtttttggaattaatatgttttttatgttttttgtaggtttaagttttgagggttaagaaaattgtaagtttgatgtttttattgtaatagatgtttttatttggttttttttttttttttttgtgatgtttaaaacgtatattaaattgttggggtttgatatttttaataattaaggaaaagaatttaattgagaattaaagtttattttatgtgggtatttttagaaaggtttagatttaagttaagttttggttagtgtgttttagaagtagtatacgtttttttggttggtttgaaagtagtgggttattttgatgaattgtttagttagttatagattaaattttatgtttttttttttgtttttacgattatttttgattagtttaaaaatatattaggttgttgaaaagtaattgtggtttttgttattattttttaaaagatggtaaaaaatataattataagtagtatatatttttttttttttttttttttttttttgagatagagtttttgttatttaggttggagtgtagtggtgtaattcggttttttgtaaatttcgtttttagggtttaagggatttttttgttttagttttttgggtcgttggaattagagg

SEQ ID NO: 2350 - DNA, 1438 bp, Artificial Sequence
  chemically treated genomic DNA (Homo sapiens)
tttttaattttagcgatttaggaggttgagataggagaattttttgaattttggaggcggagtttgtagagagtcggattgtattattgtattttagtttgggtaatagagattttgttttaaaaaaaaaaggaaaaaaaaaagaaaatgtgtgttatttataattgtgttttttgttattttttaaaaagtaatggtaaaaattataattattttttaataatttaatatatttttagattagttaagagtagtcgtgagaatagagaaaagaatatggagtttgatttgtaattgattaaataatttattaagataatttattatttttagattagttaaggaaacgtgtgttatttttaaaatatattgattagaatttggtttagatttaagtttttttaaaaatgtttatatgggataaattttagtttttaattggatttttttttttaattgttagaagtattaaattttagtaatttaatgtgcgttttaggtattatagaagagaaaggaggaagttaggtagaaatatttgttatagtggaaatattagatttatagtttttttgatttttaaggtttgaatttgtaagaaatataagaaatatgttgattttagaagtttcgatgtttatggagttaaagtgatgtggaaatagagtaaatatttatagagtagaagggttagtaggattttaagttatatcgtggttttttgggtttatttcggttgtattttgagagtgaagattgtaggtatagttagttttgttttcgggttatgattcgtttagtagaaggtattgtttataagttatcgttgagaaattcgttttgtgaaaagtagaaattgttttggttatttttttcggcgtttgtagagagatcggttgtggcgttggttaggtaatggtagttatggttggaaatcgggaataatggggtttgggttggtttgatatttttttaggaaatgatcggtttttttgaggggttatcgaacgcggtcgttttgtttagtttttttagggaaaaaataaggtataagtgatatttgttttggcgtttttgattttttttttgtttcgtttgggtttgggggttttttttattgtgaggggatttttttttgtttttagtttttatttattatttaaagggttgtttttttaggatatttagaaagatttttttgtttttttagttttatttttgttttattaaagagggtttttgttatatagtataagtttgggttttttgttttttttgggttgatttttttttaaaattgtaggtttgttaaagagatttgttgttggggtaggttgagtttggaatgtagcggaattgaggcgagaatagtagaggaagtagggggtaaagagtatttttggcgtaggttagtttaagtaatagtaaaattaaaaga

SEQ ID NO: 2351 - DNA, 642 bp, Artificial Sequence
  chemically treated genomic DNA (Homo sapiens)
ggtattattttgggtttaaatatgtaggcgaaaatatgtagttggttaggttatagagtggtgaaggtattttgtattttttggttgagatagagaaaaaaagtggttagaattgggtaattttttttttattatattattatagtgattttttttgtttttttttaggttttagttttattttatagtttttgttttttggatttattagagttaattttagtaaagtataaagaaaatggggttatatgattggttaaaaaaaaaatatttatttacgtggatgattagatagtatgaatggattgaaaatttattaggaaaaaaggatgagaggaaatgttaggagatgagggtagagagtaggtcgttttgggggagggattttgtggggatagggtggtttattgggtgtgtttttttttttttttttgttttttttagataagattagtagttttgttatttttttttttttattttatggtttcgtagttttaggtttatattgaaagtatgtcgatttaggagaatatattatttttgtagtttcggttatgggtttttaagttttaaagagatttagtaaagtttattttgattggggttttaggaggtaagaaggggagatagaagttatgg

SEQ ID NO: 2352 - DNA, 642 bp, Artificial Sequence
  chemically treated genomic DNA (Homo sapiens)
ttatggtttttgttttttttttttattttttggagttttaattaggatggattttgttaagtttttttgggatttagagatttatgatcgaagttgtagggatgatatgtttttttggatcgatatgtttttagtgtgggtttggggttgcgggattatggaatgagagggagaggatgataaaattgttggttttatttaagggagatagagaagagaaaaggggtatatttagtaggttattttgtttttatagaattttttttttagaacggtttgttttttgtttttattttttggtatttttttttattttttttttttgataaatttttaatttatttatattatttggttatttacgtgaatagatattttttttttggttagttatatggttttattttttttgtattttattgaagttagttttagtgaatttagggagtaggggttgtagggtggggttggagtttgaagaaagataaaagggattattgtgataatatggtggggggagggttatttagttttgattattttttttttttgttttaattaagaaatgtagagtgtttttattattttgtaatttggttagttgtatgttttcgtttatatgtttgaatttaagatggtatt

SEQ ID NO: 2353 - DNA, 9723 bp, Artificial Sequence
  chemically treated genomic DNA (Homo sapiens)
  unsure 4207
ggattttagttgggaggtaggggttttggattttgtttaggttttttttttttatttgttttgggattttgagtttgttgttttatgtttatggatattatttgtgttatttgtgtaatgagtatatttttatataatgagatgatttttatataatgagatgatttttaaggtttttagtgattgattttatttttgtttttttaatagagatgggggaagggttttgttatagtgtttaggttggtttggaatttttgggtttaagtagtttttttgttttggtttttcgaagtgttgggattataggtatgagtttttgtgtcggtttggatttatattttaaaaatagtatgtattgattttgtttgaatatatatatatatttttttaagacggagttttgtttttgttgtttaggttagagtgtaatggtgcgatttcggtttattgtaattttcgttttttaggtttaagaaatttttttgttttagttttttaagtagttgggattataggaatgcgttattatgtttagataattttgtatttttggtagagatagggtttttttatgttggttaggttggttttgaaatttcgacgtttggtgatttgtttgtttttattttttaaagggttggtattataggtataagttattatgtttcgtcgattttgtttgaattttataaatagtatatatttattgaaaaaaaaagaaaaatataaataataaaataaatatttggaaataatataaaatattaaaaattgtttatataaatatgaaataattttataatttggaaataattatagtaaatatttggttataatttttttttagtattgtttttatgtatgtatatatcgataagaatatatttttggttgggcgcgatggtttacgtttataattttaatattttgggaggtcgaggttggtggattacgaggttaggagtttaagattagtttggttaagatggtgaaattttatttttattaaaaatataaaaatgagttaggtatggtggtaggtatttgtaattttagttattcggaaggttgaggtaaagaattgtttgaattagggaggcggaggttgtagtgagttgagattgtgttattgtattttaatttgggttatatagtgagattttattttaaaaaaaaaaaaaaagaaggtatttttattgagtggaattatattatatattttgtttttttatttaatattatatgggtagtgtatttttttggttgtagtatttgaatgttattttgtttttatttttgattttttggtttgtttgttttttttgaggtaggttttgatttttttgtttaggttggagtgtagcggtgtgattatggtttattgtaatttttatttttcgggtttaagtgattttttttagttagttttttgaatagttgggattataggtatatgttattatgtttagttaatttttgtttttttagtaaagaaggggttttattatgttgtttaggttggttttgaatttttgggtttaagtaatttggttgttttggttttttaaagtattgggattataggtatgaattatcgtatttagtttatttgaatgttgttgatttattaatatttttttttagtatagacgtatagtttgttttttgtcgtttattgatattcgtgatatttttttttttttatttttttgttttttgtagggaattttttgttagtttagggttatatttgttatttatttttttggagtttaattagttgggagaaggtttttgggtttttgtttaaggttttttttttttttttttttttttttgagatagagtttcgttttgtcgtttaggttggagtgtagtggtttaattttggtttattgtaaatttagttttttgggtttaagtgattttattgttttagttttttgagtagttgggattataggcgcgcgttattacgtttggttaatttttgtattttagtagagatagagttttattatgttggttaagttggttttgaatttttgattttgtgattcgttcgttttagttttttaaagtgttgggattataggtgtgagttatcgtgttcggtttttgtttgaggttttttttaaggaaggaaggatttttgtttagaggtggttgtttttgtttgatatttggtttaggagtttttattttagagatcgttgagttgtttgttgggttttgggtatttgtgaagaggttttaaaaatttttatcgattcgtttatttatttaataattaatttttttagggtgtggtggtttagtttgtaattttattattttgggaggttaaggcgggtggattatttgagggtgggagtttaagattagtttgattaatatggagaaattttatttttattaaaaatataaaattagttgggtatggtggtatatgtttgtaattttagttattcgggaggttgaggtaggagaattgtttgaattcgggaggcggaggttgtcgtgattttagatttcgtcgttgtattttagtttgggtaataagagtgaaattttgttttaaaaaaaaggtagaaaaattagttagggatggtggtttaggtttgtgattttatttatttgggaggttgagatgggaggatcgtttgagttcgggaggtcgaggttgtagtaagcggtgattacgttattgtattttagtttgggtaattgaaagtaattttgttttaaaaaaatgaaaaaaaaaaaataaaaaataaaaaaattttagaagtaagattttttttggtttagaggtttgttttttagggatataaagggagattaagtgattgttttttggggagagtggagacgggttttttgtatttttagtgtttgggtgggttacgtaggggtgttcgtgtttttgaacgtattcgtgtttatttttattttttgggttttgggaaggattaatgaaattatgaaaattgatttttttggggtttgatttggggttgttttaagtgcgttataggtaacgttattaattcgtgtaagatttaatgaatagacgttattataagttttattttttaggcgagtaaataggggttcgtggttatcgatgttatggagttttggtttagaatttggggtttagaaatcgtggtttttttttttttttatcgttttttttttggtcggagtgaattttttagagaagggagggagacggtagggtttgacggaagtttcgggagttgtatagagaggcggagggagttgttttaataaggagaggttcggatttgggtatatttgtagaaaaatttttttttattaggtaggcgcgggggagggcgtggaggggcggggtggtgtcgttttcggggcgggtttagtgcgtggtagcgggatttgcggtttcgtcgcgaagtttttagttttgcgagcgtcgtcgggtcggtcgatcgttttttatatttcggttatgcggtttttgttgttattggttttgttgggttggttgttgttggtcgaagcgaagggcgacgttaagtcggagggtgagggagcgaaggtcgggggcgggagcgcggattcgggcgggagggttggtgtcgggttgtttttttgggaacgatttgaatgggaggtttgggttggagagggagtttgggtttcggttttttgtttatttaatcgttggtgatttgaataaattatttttttttttggggttgcggtttttgtttcgggaaggaaagggtgatagttgagttttatttagtatagaaaggtttaaataataatagtttttataataataatcgataatggttattttgtttagtgtttattatgggttaggtattagttaggtatgattgttattttggtaagtgtttttttttattattttcgttttttagttgggtaaattgaggttttagagtttatttatttgtttaagattatataatttgtgggttttggaattaggatttattttatttatttaggtgtttggttttagagttaggaggttttatgattatgggaatgaggggttttgagggggataggggaggaatgggggtagaaggtgtggtttattttgtggataagtttgtgtttttatttatgttttttgtggtttgtttagtttttgttagggtggtttttttttttgtagtttatnttttttattttatttaatgtattatttatttagttatttatttatttttgagatagagttttgttttgtcgtttaggttggaacgtagtatgcgatttcggtttattgtaatttttgttttttaggtaaaagtaatttttttttttttttttgagatggagtttcgttttgtcgtttaggttggaatgtagtggtataattttagtttattgtaatttttattttttaggtttaagtgttttttttgtttcggttttttaagtagttgggattataggtacgtgttattatgtttagttaatttttgtatttttagttgagatggggttttattatgttggttaggttggttttgaatttttgattttttgattcgttggttttagttttttaaaatgtttggattataggcgtgagttatcgcgttcggtcggtttaagcgatttttgtattttagttttttaggtaggtgggattatagatatgtgttattatgtttagttaatttttgtatttttggtggagatggggttttattatgttggttaggttggttttgaatttttgattttaggtgattagtttattttggttttttaaagtgttgggattataggcgtgagttattatatttggttttttttgtagtttatatttgaggaaattgaggtttagataggtgaagtgattgtttagggtggtttagatagaggtggttggttcgaggttagttgggttttagtttagcgttttttttatttttttaaggtagattggattgtagtgtgtgttttattgttttgagtgggtgttttttttttttttagttttttttggtatgggttatttttagggttgtttcgagaagggtatagattgcggatagttttagtaaagttaagtagaagtggcggtattttttatggtattttttttttttagtttatttttttggagaatttgaaattgtattattagaaggatttcgggttttttgggttaggaatgggaattattatttattttattttatttatttaatttttttttgagatagtgttttattgtgttttttaggttggagtgtagtagtatgattttggtttattgtaatttttgttttttgggtttaagtaattttcgtgcgttagttttttaagtagttgggattataggtttgtattattacgtttagttaatttttgtatttttagaagagacgaggtttcgttatgttggttaggttggttttaaatttttgattttaagtgatttttttgtttcggttttttaaagtgttgggattataggtgggagttattgtatttagttaggaattattatttttttttttttttttttttttttttttttgaggtagagttttattttcgttgtttaggttggagtttaatggtgcgattttagtttattgtaattttcgttttttaggtttaagcgatttttttgttttaatttttttagtggttgggattataggcggatgttataacgtttagttaatgtttgtatttttagtagagacggggttttattatgttggttaggttggttttaaatttttgattttaggtgattcgtttatttcggttttttaaagtatcgggattataggcgtgagttatcgcgttcggttaggaattgttattttttgagtatttttttcggattaggttgtgtttaaggttttacgttttttagtggtaaagtcggcggtgtttgttttttgtgaggtttggtgttttagtttgtaagattcggtgatattattttacgtttggagttttaataagaattttaggggatgaagttggggagagtttagtttaatgtttggtttatgaaaggttttcggtaaagggtatttttttttttagttttagggttgttggtttatagtagggtagtaagatagtttagaaagtttagtgatggaaacgttgattatcgggttgtgtaaagggttttcggtttgggtttttttattggttaggagttttgttgtggtttagttttttgggtttttgatttttttgtttttgttgatatggggtgtttgtattttagattattttaggagagaaatcgtagttgtttatgatgaagttcggtgagttgaattgaagagggattagattgatgatagggcgttaggtattttgatttttagtaagtgataggaggagggtagagtagatttaaggaagtttttatagagggtgttgttatgggcggaggataggattagtgtgttattgaggtaatttaggtagagtatttggtaggtagaaagtatatttgtgtttattgatgtataagagagtagatttttaggtttggggttaatgttaggttagtttgagttgggttttttgttttttttttttatttggatttttttttgttttttattttttttttttttttttaagtttttattttttttttttttttttttttgagatagagtttcgttttgtcgtttaggttggagtgtagtggtacgattttagcgtattgtagtttttatttttagggtttaagcgatttttttgttttagttttttaagtagttgggattataggtatgtattattatgtttggttaatttttgtatttttagtagagacggggttttgtaatgttagttaggttggttttaattttgattttaagcgatttgtttattttggttttttaaagtgttgggattataggtttgagttattacgttcggttaggatttttttgttaagtaagaaattattaattttattttggagatgggaagattgaggttttggtaggttaaatatttggttttttattgttagaattggttggaggtggggttattgtttggaatttagatttattgtttatttttgtatttttcgacgggaaggggtgttgttgtttggaaatgttgtttgggggagtttgtttagtttttttagatttagttgaggtgtgatttttagttagttggataggaggatagagtgggttgtttattttttttgtaggttttgtttgagtattttattgattagtgtgtgtgtttggtggggggtattttagtagtttttaaagaggttagtttttttttttttttggtagatggatgggaggaggtagttattgaggtggatttagttggagtagggaaggggatttgttgtggagtttcggggagtgagatgggtggggtgttgttagtagtttgtttgtttttttatttaaaacgtatggttttggtgtatggagagaaatatggatcgtttttatttttgggggtttttaatgagaggggggtatagagtattttattttagtagatattttacgtttgagggaagagatgttgcgttattttgggggggtttttagaataagatgggagatataagaaggttttaataaagtaatattttttattatagggaattgggagaataaaaggtaatatttaaataggtagatatttttagagtcgaggttagatgttttatagttttttttttcgtttgtagaaatttttagtagatttttagtttttgtttttttttgtgggttttgatttggtcgtggtgagagaaggatagttgtagagattagaggtttagttggtcgtttaggttatgttgttttttattagagaatagaagggttttaggagttagttaggttgtattggatggtgtgggggtggggtcgggtttggggagatttaagtgggtagttggtttcggggaggttaaggttggtttttacgtgtagggtattttaagtttttgttagattttgtttttggttttagtttaagtttggggtggggatgaaggatgggggaggggagagggcggaagggttttatttattttcgtttttttagggagtagattgggtgtgttatgattgtgttttgatttaggttatatagtgattatttacgttttgggttgggattgtttggggaggagggggtattcggtggtatagttaaattaggggtgtttagaggttttatttttttaggagtttattatatacgtatattttaattaagtttttatcgttagtttttttatattattttttttttttttttttttttgagatggagtttcgtttatttagtttggagtgaaatggtatgattttagtttattgtaatttttgttttttgggtttaagtagtttttttgttttagtttttcgagtagttgggattataggcgtttattattatgtttagttaatttttgtatttttagtagagatggggtttcgttatgttggttaggttggtttcgagtttttgattttatgtgatttattcgttttggttttttaaagtgttaggattataggtgtgagttatcgtatatattattttttttttaaaagtttttttaaattttatttttttgtatagatagggtttttattgtgttgtttcggttggttttgaatttttaggtttaagtgattatttttattttggttttttaaagatcgggattataggtgtgagttattgtatttggttaatttttgtggtttagtagtatgattatagtttattgtagtttttattttttgggtttaagtaatttttttgttttagttttttgagtagttgggtttagaggtgcgtgttattatgtttggttaattttttaattttttgtagagatagggttttattttgttgtataggttggttttgaatttagggttttaaataagttttttgttttggtttttttaagtgttgatattataggtgtgagttattttattttttgtattatttttgtttttaggaaggtagtttttttttatttttgatttttagggtagtatttattaagatatagtttttttttaggggaggtattttgtcgttagaattttttcgtagttattaaggtaggtattgtgttaagcgttttacggtattggtttattgaatttttatgaaagtttttggagggaggtattattatttgtattatttttattttatagatgagaaaattgaggtacggagaggttaaattttttgtttagtaatttgtttttagtattttttttgttgtattttattgatttttgttgattttggattacgggtttatttggggaagttattgttggattttgggtagtaggtggggagggttgagagttttgggtgttaggttttggttttagtttaaggtagttggttggattagatagaaagtagatgggaggggttttggtattcgaaaatgaattttttatatttatgttttaagggtttttttggtttggtttaatagtgagttgggaaaagattttattacgtgattgtagttgggtgtttgtgttgtagaggttagagagaaggtattggaagcgttggtttttgtttgtagttaggagtttggtattttaggatgttgggtttttggatagggaaatgaagataagagtatgggtattt

SEQ ID NO: 2354 - DNA, 9723 bp, Artificial Sequence
  chemically treated genomic DNA (Homo sapiens)
  unsure 5517: n is a or g or c or t
aaatgtttatgtttttgtttttatttttttgtttaagagtttaatattttaagatgttagatttttggttgtagataaaagttagcgtttttagtgttttttttttggtttttgtagtataagtatttaattgtagttacgtggtgaggtttttttttagtttattgttaggttaggttagagaaatttttaaggtatggatgtggaagatttattttcgagtattaaggttttttttatttgttttttgtttggtttagttagttgttttgggttaaggttaaggtttggtatttagagtttttagttttttttatttattgtttaaagtttagtaatgatttttttagatgaattcgtgatttaggattagtagaaattaatgagatataatagagagggtgttaaagatagattgttgggtagggaatttagttttttcgtgttttagtttttttatttgtaaaatgggaataatatagatgatagtatttttttttagagatttttatgaggatttaatgagttaatgtcgtaaagcgtttggtatagtgtttgttttggtagttgcgggggggttttggcgatagggtgttttttttaaaggggagttgtgttttggtagatgttgttttgggggttaggaataaaggggagttgtttttttgagagtaagaatgatgtagagggtggggtggtttatatttgtaatgttaatatttagggagattaaggtaggaggtttatttgaggttttgagtttaagattaatttgtgtaataaagtgagattttgtttttataaaaaattaaaaaattagttagatatggtggtacgtatttttaggtttagttatttaggaagttgaggtaggaggattgtttgagtttaggaggtgaaggttgtagtgagttatagttatgttattgggttataggaattagttaggtgtagtggtttatatttgtaatttcggtttttggggggttaaggtggggatgattatttgagtttgagggtttaagattagtcggggtaatatagtggagattttgtttgtataaaaaaataaaatttagaaaaatttttaagagaagaatgatgtgtgcggtggtttatatttgtaattttagtattttgggaggttaaggcgggtggattatatgaggttaggagttcgagattagtttggttaatatggcgaaattttatttttattaaaaatataaaaattagttgggtatgatggtgggcgtttgtaattttagttattcgggagattgaggtaggagaattgtttgaatttagggggtagaggttgtagtgagttgagattatgttattttattttagattaggtgagcgagattttattttaaaaaaagaaaaagaaaaagaatgatgtggagagattgacggtgagggtttggttggggtgtgcgtatgtgatgagtttttggaagaatgggatttttgggtatttttggtttgattgtgttatcggatgtttttttttttttaagtagttttagtttaaggcgtgggtggttattgtgtggtttgagttaaggtatagttatgatatatttagtttgttttttggggaggcgggaatgaatgaagttttttcgttttttttttttttttattttttatttttattttaggtttgaattgaagttaggaatagggtttggtaggagtttgggatgttttgtacgtgggagttaattttagttttttcggggttagttgtttatttaggtttttttagattcggttttatttttatattatttagtgtagtttgattgatttttgggatttttttgttttttagtagggaatagtatgatttgaacggttagttgagtttttgatttttgtagttgttttttttttattacggttaaattaaggtttatagggaaaggtaggagttggagatttgttagaagtttttataaacgggaggaagggttgtgggatatttgatttcggttttagggatatttgtttgtttggatgttgttttttatttttttagttttttgtgatggaagatattgttttgttgaagtttttttgtgttttttattttgttttggaagtttttttaggatggcgtaatatttttttttttagacgtggggtgtttattgaagtgaggtgttttgtattttttttttattgggagtttttaaaagtgaaaacggtttatgtttttttttatgtattaaggttatgcgttttgggtgaggggatagataagttgttgatagtattttatttattttatttttcgagattttatagtaaatttttttttttattttagttgaatttattttagtagttgtttttttttatttatttgttagggaaagggaagagttggtttttttgggggttgttggggtattttttattaaatatatatattagttagtgggatgtttaggtaagatttgtagggaagatgagtaatttattttgtttttttgtttagttggttaaaggttatattttagttgggtttgggggagttgagtaggtttttttaggtagtatttttaggtaatagtattttttttcgtcgagaggtgtagaaatgaatagtaggtttgagttttagataatgattttatttttaattagttttggtaatgagagattagatgtttaatttattaggattttagtttttttatttttaaaatggagttgatgattttttatttagtaaagggattttggtcgggcgtggtggtttaggtttgtaattttagtattttgggaagttaaggtgggtaaatcgtttgaggttaggattgagattagtttggttaatattgtaaaatttcgtttttattaaaaatataaaaattagttaggtatggtggtgtatgtttgtgattttagttatttgggaggttgagataggagaatcgtttgaattttggaggtggaggttgtagtgcgttgagatcgtgttattgtattttagtttgggcgataaagcgagattttgttttaaagaaaaaaaaaaaaagaaaatgaaaatttaaaaaaaaaaaaaaaaaatggaaaatagggagggatttaaatggagaagggaagtaaagggtttaatttagattggtttgatattagttttaggtttggggatttgtttttttgtgtattagtgagtatagatgtgttttttatttattaggtgttttatttgggttattttagtagtatattgattttgtttttcgtttatagtagtattttttgtgaaggtttttttggatttgttttgttttttttttgttatttgttggggattagggtgtttaacgttttgttattagtttggtttttttttaatttaatttatcgggttttattatgggtagttgcggttttttttttgggatggtttgggatgtaggtattttatgttagtagaagtagggggattaaaggtttagaaaattaggttataatagggtttttggttagtgaggggatttaggtcgagagttttttgtatagttcggtggttagcgtttttattattggattttttgagttgttttattgttttgttgtaagttagtagttttgggattgggagagaaaatgttttttgtcgagggttttttatgggttaggtattgagttgaattttttttaattttattttttggaatttttgttagagttttaggcgtgaggtagtattatcgggttttgtaggttagaatattaagttttatagagagtaagtatcgtcggttttattattgggagacgtggggttttgggtataatttggttcgagggaggtatttaagaaatggtagtttttggtcgggcgcggtggtttacgtttgtaatttcggtattttgggaggtcgaggtaggcggattatttgagattaagagtttgaaattagtttgattaatatggtgaaatttcgtttttattaaaaatataaatattagttgagcgttgtggtattcgtttgtaattttagttattagggagattgaggtaggagaatcgtttgaatttgggaggcggaggttgtagtgagttgagatcgtattattggattttagtttgggtaacgggagtgaaattttgttttaaaaaaaaaaaaagaaagaaaagaaaagaaatggtggtttttggttgggtgtagtggtttttatttgtaattttagtattttgggaggtcgaggtaggaggattatttgaggttaggagtttgaaattagtttggttaatatggcgaaatttcgttttttttaaagatataaaaattagttgggcgtggtggtgtaggtttgtaattttagttatttgggaggttgacgtacgagaattgtttgaatttaggagatagaggttgtagtgagttaaggttatgttattgtattttagtttgggggatatagtgaaatattgttttaaaaaaaaattaaataaataaaataaaataaatggtggtttttatttttgatttaaagaattcgggatttttttggtgatatagttttaggttttttaggagggtaagttgaaggaggagaatgttatggaaagtatcgttatttttgtttggttttgttgggattgttcgtagtttatgtttttttcgggatagttttggagatggtttatgttagggagggttggggaggagggaagtatttatttaggatagtggggtatatattgtaatttaatttgttttgaggaagtagaaagagcgttagattggagtttagttgatttcggattaattatttttgtttggattattttggatagttattttatttgtttgggttttagtttttttaagtataaattgtagagagggttaggtgtggtggtttacgtttgtaattttaatattttgggagattaaggtgggttgattatttgaggttaagagtttaagattagtttggttaatatggtgaaattttatttttattaaaaatataaaaattagttgggtatggtggtatatgtttgtgattttatttatttgggaggttgaggtataggagtcgtttgaatcggtcgggcgcgatggtttacgtttgtaatttaaatattttgggaggttgaggttagcggattaagaggttagaagtttaagattagtttggttagtatggtgaaattttattttaattaaaaatataaaaattagttaggtatggtggtacgtgtttgtaattttagttatttgggaggtcgaggtaggagaaatatttgaatttgggaggtggaggttgtagtgagttgagattgtgttattgtattttagtttgggcgatagagcgagattttattttaaaaaaaaaaaaaagaattgtttttatttgggaggtagaggttgtagtaagtcgagatcgtatattgcgttttagtttgggcgatagagtaagattttgttttaaaaataaataaataattaaataaataatatattaagtaaaataaaaaanataaattgtagagaggaagattattttggtaggggttaagtagattataggggatatggatgaaagtataaatttatttataaagtgagttatattttttatttttattttttttttgttttttttaagattttttatttttatggttatgaggttttttggttttggaattagatatttgggtgggtggggtaaattttggttttaaggtttataagttgtatgattttgggtaagtgaatgaattttggagttttagtttgtttagttggaaaacggggataatagaaggaaatatttattagggtagtaattatgtttaattgatgtttggtttatagtgagtattgggtagaatagttattgtcggttattattatgaaaattattattatttgagtttttttgtgttgaatgggatttagttgttattttttttttttcgaagtaggaatcgtagttttaagaggggaagtgatttgtttaagttattagcgattaagtggataaggagtcggaatttagattttttttttagtttaggttttttatttaggtcgtttttagggaggtagttcgatattagttttttcgttcggattcgcgttttcgttttcggttttcgtttttttatttttcggtttggcgtcgtttttcgtttcggttagtagtagttagtttagtagggttagtagtagtaggggtcgtatggtcgaggtatgggggacgatcggtcgattcggcggcgttcgtagggttggaaatttcgcgacggggtcgtaggtttcgttgttacgtattgggttcgtttcgggggcggtattatttcgtttttttacgttttttttcgcgtttgtttagtggggaagggtttttttgtagatatgtttaagttcgggtttttttttattagggtagtttttttcgtttttttgtgtagttttcggggttttcgttaggttttgtcgttttttttttttttttggggggtttatttcgattagaaagagggcggtgagaggagagagaggttacgatttttagattttaggttttgggttaaggttttatggtatcgatagttacgagtttttgtttgttcgtttgaaaagtggggtttatgatagcgtttgtttattgggttttgtacgggttaatggcgttatttgtagcgtatttagagtagttttaggttaagttttaaggaagttagtttttatgattttattagttttttttaaaatttaaggggtgagggtgggtacggatgcgtttagagatacggatatttttacgtggtttatttaggtattggaaatgtaggaagttcgtttttattttttttaaaaggtaattatttgatttttttttgtgtttttgggaggtaaatttttgagttaaggaaagttttgtttttgaggtttttttgttttttgtttttttttttttatttttttgagataaggttgtttttagttgtttaggttggagtgtagtggcgtgattatcgtttgttgtagtttcgatttttcgggtttaagcgatttttttattttagttttttaagtaggtgggattataggtttgagttattatttttggttaatttttttattttttttttgagatagagttttatttttgttgtttaggttggagtgtaacggcgagatttggggttacggtaattttcgtttttcgggtttaagtaatttttttgttttagtttttcgagtagttgggattataggtatgtgttattatgtttagttaattttgtatttttagtagaggtggggtttttttatgttggttaggttggttttgaatttttatttttagatgatttattcgttttggttttttaaagtggtgggattataggttgagttattatattttagagagattaattgttaaatgagtaaacgaatcgatgaaagtttttagggtttttttatagatatttaaagtttaataaataatttaacggtttttagagtaagggtttttggattagatgttagataggggtagttatttttgaataaaaatttttttttttttggaagaaattttagatagaggtcgggtacggtggtttatatttgtaattttagtattttgggaggttgaggcgagcggattataaggttaggagtttaagattagtttgattaatatggtgaaattttgtttttattaaaatataaaaattagttaggcgtggtggcgcgcgtttgtaattttagttatttaggaggttgaggtagtagaattatttgaatttaggagattgagtttgtagtgagttaagattgaattattgtattttagtttaggcgatagagcgaaattttgttttaaaaaaaaaaaaaaagaaaaaaaagattttagatagggatttaggagtttttttttagttgattaggttttagaggagtgggtggtaggtgtaattttaggttggtagggggttttttgtagggggtaaaggggtgggagagaaggaatgttacgaatgttaatggacgataaagagtaggttatgcgtttgtgttgggaaaagatattaataaattaatagtatttagatgagttgggtgcggtggtttatgtttgtaattttagtattttgggaggttaagatagttagattgtttgagtttaggaatttaagattagtttgggtaatatggtgaaattttttttttattaaaaaaataaaaattagttgggtatggtggtatgtgtttgtagttttagttatttaggaggttgattggggaggattatttgagttcgggaggtggaggttgtagtgagttatgattatatcgttgtattttagtttgggtaagagagttagaatttgttttaaaaaaaataaataaattaaaaaattaaaaataaaaataaaatagtatttagatgttgtagttagagaaatatattatttatatgatgttaagtggaaaagtagaatatatagtatggttttatttagtaaaaatattttttttttttttttttttgagatggagttttattgtatagtttaggttggagtgtagtggtataattttagtttattgtaattttcgtttttttggtttaagtaattttttgttttagtttttcgagtagttgggattataggtgtttgttattatgtttggtttatttttgtatttttagtagagatgaggttttattattttggttaggttggttttgaatttttgatttcgtgatttattagtttcggttttttaaagtgttgggattataggcgtgagttatcgcgtttagttaaaaatatatttttatcgatgtatatatgtatagagataatgttaggagaaaattatggttaaatatttattgtgattatttttaggttgtgggattattttatatttatatagataatttttgatgttttatattatttttaagtatttattttgttatttatattttttttttttttttaataaatatatattatttgtaaaatttaaataaaatcggcggggtatggtggtttatgtttgtaatattagttttttgggaggtggaggtaggtagattattagacgtcgggattttaagattagtttgattaatatggagaaattttgtttttattaaaaatataaaattatttgggtatggtggcgtatttttgtaattttagttatttgggaggttgaggtaggagaattttttgagtttggaaggcggagattgtagtgagtcgagatcgtattattgtattttagtttgggtaataagagtaaaatttcgttttgaaaaaatatatatatatatttaaataaaattaatatatgttatttttagaatataggtttaggtcggtatagagatttatgtttgtaattttagtatttcgggaggttaaggtaggaggattgtttgggtttaggagttttagattagtttggatattatagtaaaattttttttttatttttattaaaaaaataaagatagagttagttattgggaattttggaaattattttattgtgtggaaattattttattgtatggagatgtgtttattgtatagatagtataagtgatatttataggtatggggtagtaagtttaaggttttaaggtaagtaaaaggaagaggtttgagtagaatttagggtttttattttttagttgggattt

SEQ ID NO: 2355 - DNA, 804 bp, Artificial Sequence
  chemically treated genomic DNA (Homo sapiens)
aagaggtgatagagaattggtttaaaattgaattttttttgggatttaagttttttttttaataggtggggacgtttttagagtcgagggggaaggtttcggggatggtgttggattcggatttgtgttttttagaagtgaaggttatgtattgggaggaaaagaggaaaggtatatttgagtgagtttgcgtgtaggttttggggcgattggtttggtcggcgatgggggagttttattgttgataaatattgggtacgttgtcgggcggttttagttttcgtaggttcggtttgttgttaatattaaggagttgtttatggattcgttttttcgtggattggttttaagtgtttttatttattttttttacgattaaagtttttgcggttttttttttaggttgttattttagttggatttggtaagtttgtgttggggaacgttaattttagtattaagcgttcgtcgtttcggttttgaggagggtagtgacgggtacggtcgtttatttttagttcggcgttaatacggttaatttttagtttttatagatgtcgtcgtttcgtttttgttagtttaatgttttattggtgaacgtgattcgggggtttttaagtttcgttaatttagatgtaggagaggtagggttagcgtgtcgcgagaatagagtggacggagagtaggagagatcgaaaaggttgggggtgggagtagcggatttgaagtatttgttggtttatagaggtgtggtaagtagagtattttagaatttaggcgtattgttcgtcgttcgagaggtat

SEQ ID NO: 2356 - DNA, 804 bp, Artificial Sequence
  chemically treated genomic DNA (Homo sapiens)
atgtttttcgggcggcgggtagtacgtttgagttttgaggtgttttgtttgttatatttttgtaggttaataagtgttttaaattcgttatttttatttttagttttttcggttttttttatttttcgtttattttgttttcgcggtacgttaattttattttttttatatttggattggcgggatttggaagttttcggattacgtttattaataaaatattgaattggtagaggcggagcgacggtatttgtaagagttggaggttaatcgtgttagcgtcgagttgggagtgagcggtcgtattcgttattgttttttttaggatcgaggcggcgagcgtttaatgttggagttagcgttttttagtataagtttattaggtttagttagggtgataatttagagggaaggtcgtaggagttttggtcgtagggagaatagatagggatatttaaggttagtttacggggaggcgggtttataaatagttttttgatgttagtaatagatcgggtttacgggagttagggtcgttcggtaacgtatttagtgtttgttaatagtgggatttttttatcgtcgattaaattagtcgttttagagtttgtacgtaggtttatttaagtatgtttttttttttttttttttagtatataatttttatttttgggggatataggttcgggtttagtattattttcgaaattttttttttcggttttgagagcgtttttatttgttagagagggaatttgggttttaagaaggatttaattttgggttagttttttattatttttt

SEQ ID NO: 2357 - DNA, 1710 bp, Artificial Sequence
  chemically treated genomic DNA (Homo sapiens)
aaataatagaagtggggttatttaggtatcgttaatgtttattatatttatatggtagagaataaatatagtatattagaagtttgcgttttgggtattaaaaaaaaaaaaaaaagtaaaatttttttaggttattgattatttttttttgtttttttttatttgattttttaggtaaggtgtaatttaaatttttggagaattttttaaatatagttgttgtttaatgttatttagaaataaggaaagaaatttgatacggagatattttatattttggttgtttggaaaaatattatttttgaggttatttaatttattaagttatttttattattgttttgtttgtttattttttggtatagttttaatgaaagatatgtggttttaattatgtaaaatcgatttggggggaattagttgtttttttaggttttcgtaggattttagtttttttaattattttcgtcgttttttaaaattggtaggttttggacgttttgtatgttgaagaaaattattgttttgtttttagaaaggaatataaatgttgtaatattgatttttttttttatgaagaaagagtgaataagtgtatcgagttgagtttttttttatagagttatcgggttggggatcggggagcggaggttgaaatttttagacgtcggttttttgggttgggttttttgttttatttattttttttttttttttttggattttatcgatcgttcgcgaaatagttttttatataatggagttttatgttttcgtgtaggaagtatttatcgattgatgtggtagattttgttttttggtaaaagtgagtatttatggcgagttgagtttttcgacggtttcggtagggttgtcgggcggtcgtttttcgggatgcgggttcgaggttcgcgtgttgaaggggagagcggggttatcggcgcgggtttttggagagaacgttagttaggagttagacgggtagtcggcggggaagttcgggattcgttcgtttttcgttcggatgttttttttttgaggggttaaaaatatttttaaggtgttttgtttttattattgtttttaattttagtttttataaattgtattcggttcgtattcgtttttgttaaaggtatttttatttgtatttttgagtatgagtttcggcgttgattgtgggatttttagaatgtaaattatttgcgttaaaataaaaagaaaagaaaaaaagagcggggagggggaaggggcgtagataggtgatgtgatgaaagtcggattcgagatttttttattagtagtagtcgtcgtcgtagtagtttcgcgggtattcggcggggaaagtttagggttagtaatgttgatttgaaaggtgttgttttttttaaaagttagcgggggtaggggtagatgagtagttttcgggttagaagtcggagttggacggaggtatttaggtagaggaattgtagttcgggaggaagttggaaggagagttcgttggagaagggaggagggaagggaagaggagttggttaaagttaggtaaatttaggtaattggagggtcggttcgagtgttacggtaggggaaggtaagggttggagtgttggttttttgagtagaaaattatttttttagtgatttttatttgtattttgggaagtaatttatattgttttgaaaataagtattaggggattttat

SEQ ID NO: 2358 - DNA, 1710 bp, Artificial Sequence
  chemically treated genomic DNA (Homo sapiens)
atagaattttttagtgtttgtttttagggtagtgtgggttgttttttaggatataggtagaggttattaaaaggatagttttttatttaaagagttagtattttagtttttgtttttttttgtcgtagtattcgggtcggttttttagttatttgagtttgtttgattttaattaatttttttttttttttttttttttttttttagcgggttttttttttagttttttttcgggttgtaatttttttgtttaggtgttttcgtttagtttcggtttttggttcggaggttgtttatttgtttttattttcgttgatttttgggaggagtaatattttttaggttagtattgttaattttaaatttttttcgtcggatgttcgcgaggttgttgcggcggcggttgttgttgatgggagagtttcgagttcggtttttattatattatttgtttgcgtttttttttttttttcgtttttttttttttttttttttattttgacgtaaataatttgtattttgagaattttataattaacgtcgaaatttatgtttaaggatataggtgaagatgtttttgataaaggcgaatgcgagtcgagtgtagtttgtaaaagttggggttgggggtagtggtggaggtaaagtattttaagagtatttttagttttttagagaagggatattcgggcgggaggcgggcggatttcgggttttttcgtcggttgttcgtttggtttttggttggcgttttttttaggagttcgcgtcggtggtttcgtttttttttttagtacgcgggtttcgaattcgtatttcggagagcggtcgttcggtagttttgtcgaggtcgtcggaggatttagttcgttatgggtatttatttttgttagggagtaaagtttgttatattagtcgatgagtattttttgtacgaggatatgaagttttattgtgtggaaagttgtttcgcgaacggtcggtaaaatttagaaagagggagaaggagtgagtaaggtagaaagtttagtttagaaaatcggcgtttggggattttagttttcgtttttcggtttttagttcggtggttttgtgagaagaagtttaattcggtgtatttgtttattttttttttatgagaggaggagttagtgttgtaatatttatgtttttttttggaggtaaaatagtgattttttttagtatgtaaaacgtttagagtttgttagttttagaaggcgacggaggtagttgggggagttggaattttgcgaagatttgaagaaataattgattttttttagatcggttttgtatgattagggttatatattttttattgagattgtattagaaaatagatagataaaataataataaaaatgatttagtgagttgaatgattttaaagatgatatttttttaggtagttaagatgtggagtgttttcgtgttaaatttttttttttatttttgagtaatattgaatagtagttatatttgagaggttttttagggatttgaattgtattttgtttgaggagttagatagaaaggagtaaaagaagatagttagtgatttaagaaggttttgtttttttttttttttttaatatttaaagcgtaaatttttagtgtgttgtgtttattttttgttatatgaatataataaatattggcggtgtttaaatagttttatttttgttgttt

SEQ ID NO: 2359 - DNA, 1014 bp, Artificial Sequence
  chemically treated genomic DNA (Homo sapiens)
aggaaggttgagataggagaattatttgaattcggagtggaggttgtagtgagtcgaaattgcgttattgttttttagtttgggcgatagagtgagattttgttttaaaaaaaaaaaaaatttttttaaattaataaataggtagatgtatagatagatatttatttttaattgaagtttttatcggagtaagattttttttaaggtagattattttaatattttttttttttttttatgttttttatattatttttatgtttgtatggtatataagatcgaaaaaatatgtggatgattaaaatgattttatttgtttttattattattatagttttttttaaagtttttattgatttttaggttttggttaatatgtttttaggataatttagtgttttattgtttttgtttttgaatttagggattttgtttttttgaattttggaagttgttttgattagttagagaattgcgttttttatttttttttttttggaaacgttatattgtggaggaaaagtaagtaattagggagttggtgaagaaggatgttttagtagtgtttattaggtttttaatattagagtttattttttagtttcgaaaagttttttggaaatgtttttgttattattttttttttcgggttgggcgttgggagcgggcggtttttttcgttttcggttgtttcgtcgaggttcgttgggtcgttggcgtcgtcgcgtagtacggtttagatcgaggcgtataggttcgtagtttcgcggcgtttagcgtttcggttttcgtcgcgacgcgttatcgtttttgtcggcgttttcgcgcgtttcgaaatgagggttttgggtgggcgttgcggggcgttgttggcgtgtttttttttagtgtttttcgttttagaggtaaattgtgagtaattaatagcgtttttttttttttttttagtattgtcgattgaattgcgtttttggttggtaggatttttttttttagagttgtagtttttagaaa

SEQ ID NO: 2360 - DNA, 1014 bp, Artificial Sequence
  chemically treated genomic DNA (Homo sapiens)
tttttaggagttgtagttttagagaagaaaattttattaattagggacgtagtttagtcgataatgttggggaagggagaagagacgttattgattatttatagtttgtttttgagacgggaagtattaggaggagatacgttagtagcgtttcgtagcgtttatttaggatttttatttcgaagcgcgcggaggcgtcggtagggacggtggcgcgtcgcggcggggatcggagcgttaggcgtcgcggagttgcgagtttgtgcgtttcggtttgagtcgtgttgcgcggcggcgttagcgatttagcgagtttcggcggaatagtcgggggcggaggagatcgttcgtttttagcgtttagttcgagaggggaagtgataataaggatatttttaggaagtttttcggagttgggggatgggttttagtgttggaggtttagtaaatattgttgagatatttttttttattagttttttagttgtttgttttttttttatagtgtgacgtttttaaaggggaaggggtggggaacgtagttttttgattggttaagataatttttagggtttaagaggataggatttttaggtttagaagtagaaatagtgagatattgagttgttttgaagatatattaattaaaatttggaagttaatgaggattttaggaagaattatggtgatagtaaaagtaaatggggttattttgattatttatatgttttttcggttttgtatgttatataggtataaaaataatgtaaagaatatgaagaaaagaagggaatattagaataatttattttaaaaaaaattttgtttcgataaagattttagttgaaagtgaatatttatttatatatttatttatttattaatttaaaaaaattttttttttttttgagatagagttttattttgtcgtttaggttggagaatagtggcgtaatttcggtttattgtaatttttatttcgggtttaagtgatttttttgttttagttttttt

SEQ ID NO: 2361 - DNA, 772 bp, Artificial Sequence
  chemically treated genomic DNA (Homo sapiens)
aattagattagtagtttttttatttatttggtcgttttagtaagttaaatattgatattttttattaagttattttgttaatatttattttgttatatttatgttgaatttgtttgttattttttaagtaagaaaattattgattattttgtggggatttaatttaaaaaaaatggtaatggatattgtaaaggagtattatttggatggtttaaaaatattttttttgatgggaaaattttttaaaaggttttttaatttggtgtaattatttgaattaaggaagtgtaatgttattttattgatttagaataatttttttgattttttgtaaagaggatttttatagtatttttggagaagttagtaaaatcgaatttgatattattatttagtagtttatgtagttagtaagtggtttgtttttagggtaatagaggaggaaattgtttttcgtttgataagataatagtggagagtatgtatttatttatttatttttatatttttgattcgtttttatagagaaaaatttttatagagataataattattttgttttttagaaggacgtatgtagttttttagggatacggttgatttttagatatgattatgtatttgtggtttaaatttttggtatttggttttgtttttttggatatagaagtatttgtgataggtaagtataaggatattaatattttttaaattatttttttttttttggaggaatgtttgaaatagatataaaaataatttaaatgtgttg

SEQ ID NO: 2362 - DNA, 772 bp, Artificial Sequence
  chemically treated genomic DNA (Homo sapiens)
taatatatttaaattatttttatgtttattttaaatatttttttaaaagagaaaaaataatttaaaaaatattaatatttttgtatttatttgttataaatatttttgtgtttagaaaggtaaagttaaatgttaagagtttaagttataaatatatggttatatttggaagttagtcgtgtttttaagaaattgtatgcgtttttttgaaaagtaaaataattgttatttttgtagaagtttttttttgtaaaaacgaattaaaaatgtaaaagtaaataaataaatgtatattttttattgttgttttattagacgaggaataatttttttttttgttattttaagaataaattatttgttagttgtatgaattgttaggtgatgatgttagattcggttttattaatttttttaaaaatattgtaagggttttttttgtaggaagttaaaaaagttgttttaagttagtagaatggtattgtatttttttaatttaagtaattatattaagttagaaagttttttaaaagatttttttattaaggaagatgtttttaaattatttaaataatgtttttttatagtatttattattattttttttaaattaaatttttataaaataattaataatttttttatttaagagatgataaatagatttagtataagtataataaaatgggtgttggtaagatgatttagtagaaagtattaatatttgatttattgagacggttaaatgaatgaaaaaattattaatttggtt

SEQ ID NO: 2363 - DNA, 1194 bp, Artificial Sequence
  chemically treated genomic DNA (Homo sapiens)
aattatttagtttatttttggatggatgataatttagattggatgtgtagtagcgtttttttaattagttttttattaatttttattttatttttagtgtttttttagaatgtaaataatatggtattaaatatttttatatatagttttttgtgtatgtgtatatttatttttttagaattagtgtttagaagtgaaattgtcgggagaaggatatatatttttaatatgtttaagttttattgtgatagcgttgcgagggtatataataggttttaatatattttggattaaatcggatattattagtttttttaatttgttgttaatgtgatgggggaaaaatgaattcggaatttatatataaggaaaagatcgtttaaggtttagggattgtttatatagttgttaagtggcggagtcgtgatttggtattaaagtgttcggagaggacgcgttaaagttggatattgtgttttgtgttttgaggtacgtttggtgatcgttgggttttgtaatgttgggtaggtaggtttttttttttttttttaggtttttggttatttttggttggtcgaaagtcggtttttttcgattatcgagtgttttttttgaaagtaagttagcgtcgtttaatttttttagtttcgaaatggcggttattagatcgttaggttacgtttcgggggcgggtttgagtttaggttagagcgatggatgttcgagttaagttagaagtcgattgttagtagggttcgcgtagaatcggaggtcggtggcgtcgcggtcgggaggacggagtatcgagtcgagggttcgttcgtttgggtcgttcgagagttttaatcgcgggcgttttggcgttatttttagatggcgggagtaagaggaaaacgattgtgaggcgggaacggttttttgttgttttttttgggtttcgaaaagggttagttggtcgggttttggggcgcgtgtttgaggcgcggacgcgtttgttacgatgcgggggttgttcggggtttcgtttttgggttggggacgcgtcgaatgtgatcgtttttcgtttttttattcgtcgcggggaggaggagcgggcgagaagttgtcgtcgaacgataggacgttggggcggtttggtttttttaggtaggtggtaggatcgggtcgtggatgtcgggggagtcggcggcgggt

SEQ ID NO: 2364 - DNA, 1194 bp, Artificial Sequence
  chemically treated genomic DNA (Homo sapiens)
gttcgtcgtcggttttttcggtatttacgattcggttttgttatttatttgagggagttaggtcgttttaacgttttgtcgttcggcggtagtttttcgttcgtttttttttttcgcggcgggtgagggagcgggaggcggttatattcggcgcgtttttagtttagggacggagtttcgagtagttttcgtatcgtagtaaacgcgttcgcgttttaggtacgcgttttaaagttcggttagttgatttttttcggggtttaaaaaaggtagtagaaagtcgttttcgttttataatcgttttttttttattttcgttatttaaagatggcgttaaagcgttcgcgattaagattttcgggcggtttagacgagcgagttttcgattcggtgtttcgttttttcgatcgcgacgttatcggttttcgattttgcgcgagttttattggtagtcgatttttaatttggttcgggtatttatcgttttggtttgaatttaggttcgttttcggggcgtggtttagcgatttggtggtcgttatttcgaagttgaagaggttaggcgacgttgatttgtttttaggagaggtattcggtaatcgagaagaatcggttttcggttagttaggagtggttagaggtttagaaggggagaggaaggtttgtttgtttagtattgtaaggtttagcgattattagacgtgttttaggatatagggtatagtgtttaattttgacgcgtttttttcgggtattttaatattaaattacggtttcgttatttgatagttatgtggatagtttttgaattttaaacggttttttttttgtgtgtaaatttcgagtttattttttttttattatattagtaataagttaaaaaaattgataatattcggtttggtttaaggtatattgaaatttgttgtgtgttttcgtagcgttattatagtggaatttggatatgttaaaagtatatatttttttttcggtagttttatttttagatattaattttagagaaataagtatatatatatataaaaagttatgtgtgaagatatttaatgttatattatttgtattttggagaaatattggggatgaaatgaagattaataggaaattggttaagagaacgttgttatatatttaatttgggttgttatttatttaagaatgaattagatagtt

SEQ ID NO: 2365 - DNA, 2841 bp, Artificial Sequence
  chemically treated genomic DNA (Homo sapiens)
gttcggggtcgtagtttttagattttttcgggttttcggattttttcggggtcgttttcggttttcgggggtggggtggtagggtcgttcggtgttatagcgtcgtagtataaataggcgtcggacgcggagtcgttaggaagcgcgggagggggggcgggttcgagggggggtcgggtcgtttggtaatttttttttgttcgggtttcgtcgtttagtacgggggcggggttagtcggttgattttttggtttattttcgtcgttcggttttaggtttttttcggattttcgttttcggatttttaggggacggggaaggtagcgttcgtttcgatattttcgttttttagttttttaattttttagggttgagcggattaattttattattttcgcgaggggtaggggcggggttataaaacgggttttcggtttaggggcggagtttttcgtaaggggtaaggttaaggtattttgtattggggttgataggggggcgggttattagggttgaggatgggaggtagtttagggtattggggttagggtggtattagtttagtttaagtcgggtcgggttgatttagtattttgttttagttagtttttatttttgatatttttgtatttttttgggtagagatgggagatggcgtcggtgttgtttttggtgttgtttttgtagtttcgtattcgtttggtataagggttttggttttttttttggttgttggcgttggttggtggcgttatttttttttgtagtgggtattttttggtttagttaaggtattttggtatttttttggtttttttttgttagttttttgttttgttttaggttgttttggtagcgggcgcggtggttttgggtataggattagtgggtgtaggagttagtcgggtaagtttgaatgtagttttatattttttttggcgaggggttttgggttcgttgttggtggttggtacggttggtgggggggggtttttggtcgtcgttttcgggttagttttggttttgtttgggagtttggatgaggcgttggaggagggtttggtgattgttttggtttattataaggatatagaggtgtttgggtattgttaggttaaaaggttggtggatgagttgtaattgaggtattattgttgcgggcgttacgggtataaggattggtttggggtttagtgggttagtagtcgttatttggatttcggtgatcgggatgtggttgagtgagtgatttgcgtttttttttttttttttttttttttttggataggtttttttttgttgttttgaatttttatttcgtttagaggggtaataagtagaatatagtggttgagagattggttatagttttgttatttattagttgtgaaatttagggtatgttattaaattattttgggtttatttttttatttgtaaaatggaaataatagtatttatttgatagagttgttgtgaagatgtgaattatgtttggttggtatatagtatagtagttagtaaatgttttattatttttttttttttttgaatatttgtgttttttagttttttttttaggtttttatttttagatatttttaatttttttgtttttttttttgtagtcggatttagagtaatgtagaaggtttatatttgattgatggggttttttttttttgttgtaatttttatttatttcggttttgtttgtaaaatcgttttttagatttttacgtttattttttgttcgattttcgataatttaattaaaatttttgggtttaagggtgttatgaggtgttgttggagtatttgtaggatttggtaggtatattgggtagtatgttggttgttatttttttattgtaggtgagttagtaaagtatttgatatttttttttattcgggatttttttttgtttttaattttgggttttttggaatcgttgattttttttgattttttttttttgttttttttataggttttggtgttttttggtttgcggtatttgtaaatagtattggaggggtttggaggggttattgatgcgggaggagagatttagggttattttttttttagtgggttgaaagatatgttgaaaatagtatggttatagggaggggttgtttgtaggttagtatttgaggaggttttattaggagaagtattttttaaggaggatttatttgaggtttagaggtttggagtttggggtgaggaagagggagggatggataagtttgaaaattttataattttttattaaggttttaggttggggggatcgtaggattagaggggttaaggatagttagcgagttggattggggtaagaaagaaaattagatgttttagggtttagtttttgtagttagaattattagggaatagtaaagaatagagtgatgggaaagtgatatgagaaggtttggaggttgattttgatatagatttaataaagtttttggatggaagtaattgtttttttttgttaaggggatgggggtttgggagaattgatttttgtttgatggagtagttaggattttaaagtttggattttggttcgatttgtgtagtaataggagtttatatttgtaaggattagaaagtaagaatttaatgtaagaagtaaagggaaaataagaggtttttttaggttgagattttttattttggaggtaggaagggggttagtatgtttaggtgggaagggtttagtttagtttttttagtttttagtgtatgtttagttttaataagttatttagttatttagttgtttttttttttgggtttatttgtttttttgttttattttagatagg

SEQ ID NO: 2366 - DNA, 2841 bp, Artificial Sequence
  chemically treated genomic DNA (Homo sapiens)
tttgtttagggtggaatagaaggatagatggatttaggagggagggtagttgagtaattgggtaatttattggggttgggtatgtattgggggttggaggagttgggttggattttttttatttgagtatgttgattttttttttatttttagaataaagaattttaatttggaggggttttttgttttttttttgttttttatattgggtttttgttttttgatttttatagatgtgggtttttgttgttgtataggtcgagttagggtttaaattttggagttttagttgttttattagatagaaattagtttttttaggtttttatttttttgataagaaaaagtaattgtttttatttaaaaattttattgagtttatattagaattagtttttaggtttttttatgttatttttttattattttgttttttgttgttttttggtggttttgattataagggttaggttttaggatatttggtttttttttttattttagtttagttcgttgattatttttagtttttttaattttacgatttttttaatttggagttttggtaaggagttgtgaggtttttagatttgtttattttttttttttttttattttaagttttaggtttttaggttttagatagattttttttgggaggtgttttttttggtggggtttttttaggtgttggtttgtaggtaatttttttttgtagttatgttgtttttagtatattttttagtttattgggaaagagatagttttgggttttttttttcgtattaatgatttttttaagtttttttagtgttgtttgtaggtatcgtaggttaaggagtattagagtttgtgggggaagtaaggggaaagagttagggagagttagcggttttaagaggtttagggttggaggtagggaggagtttcgggtgggaggaggtgttagatgttttgttgatttatttgtagtaggaaggtgatagttagtatgttatttagtgtgtttgttaagttttgtaagtgttttagtagtattttatggtatttttgggtttagaggttttggttgggttgtcggggatcgaatagggggtgggcgtaggagtttgaaagacggttttgtaggtaaggtcggggtgagtgggggttgtaataggagaaagggattttattagttaggtataggttttttatattgttttggattcggttgtaaagggagggatagaggggttaaggatgtttggagatagaggtttgggggagggattgaagggtataggtgtttagaagggaaaaagaatagtaaaatatttattgattgttgtattatgtgttagttaagtataatttatatttttataataattttattagataagtattattatttttattttataggtgaaggaatgggtttagggtggtttggtaatatgttttgggttttatagttagtaaatggtagagttgtaattagttttttagttattatgttttatttattgtttttttgagcgaggtggggatttaaggtagtaggagggagtttgtttagggaggaggaggaggaggaagggagacgtaaattatttatttagttatatttcggttatcgggatttaggtaacggttgttgatttattggattttaaattaatttttgtattcgtggcgttcgtagtagtggtattttagttgtagtttatttattagttttttggtttgatagtgtttaggtatttttgtgtttttgtagtgagttaaggtagttattaggtttttttttagcgttttatttagatttttaggtaaagttagggttagttcgagggcgacgattaggagtttttttttattagtcgtgttagttattagtagcgggtttaggatttttcgttagggagggtatagagttgtatttagatttgttcggttggtttttatatttattagttttgtgtttagagttatcgcgttcgttgttagggtagtttggggtaggatagggaattgataggagggagttaggaaggtgttaaggtgttttagttggattaggaggtgtttattatagaggaggatgacgttattagttagcgttagtagttaggagaggagttagagtttttgtgttaggcggatgcggggttgtaggggtagtattaggggtaatatcggcgttattttttatttttgtttaagggagtgtagaggtgttagggatggaagttggttggggtaggatgttgagttagttcggttcggtttgagttgggttaatgttattttgattttaatattttgagttattttttatttttagttttaataattcgtttttttgttagttttaatataagatgttttggttttgttttttacgagaaatttcgtttttaggtcgagggttcgttttgtgatttcgtttttgtttttcgcggaagtggtggggttggttcgtttaattttgaggggttagggggttggggggcggagatatcggggcgggcgttatttttttcgttttttgggaattcgggggcggggattcgggaagggtttggagtcggacggcgggagtaggttagggggttagtcggttagtttcgttttcgtattgagcggcgaggttcggatagggaggggttattaagcggttcggttttttttcgggttcgttttttttttcgcgttttttggcggtttcgcgttcggcgtttgtttgtgttgcggcgttgtggtatcggacggttttgttattttattttcgggagtcgagagcggtttcgggagagttcgagggttcgggggggtttggagattgcggtttcgggt

SEQ ID NO: 2367 - DNA, 636 bp, Artificial Sequence
  chemically treated genomic DNA (Homo sapiens)
gttagtttggaaagattggtatgaattttttagtatttgggggtgttaattattaagagtagtatagtttttgtttataagttatttgtagtaggtgtgaatattttatttttttttttggggtttgtaattttttttttagtttcggttattgtttttggttgtattatttttttttttttttcgtttgtattttttttattttttttttatgatgatatcgttttggggaagagaagttgagaggaattttttatttagttagttttaggagttatgatattatttttattatggaaattttatttatttttttgtgtttttatatttgttttaggttttagagtttttataaagagagatttttaatttagtattagtataggatatagttaggttttgaagtttttgagttttgtagttttatttttgagaaaattttttttttattaatattatgaagttttgcgtgattgttttgtttttttttatgttagtatttgttttttgttttttagcgtttttagtattaagtaagtttatttttgtagttgttatttcgagttaaggtgtaggtagagtttttttttttatttatggttggtaaatagtgggatttggggatgggataaaagg

SEQ ID NO: 2368 - DNA, 636 bp, Artificial Sequence
  chemically treated genomic DNA (Homo sapiens)
ttttttgttttatttttagattttattgtttgttagttatgaatagaaaaaaggattttgtttatattttgattcgaaatagtagttgtaaaagtagatttatttggtgttgagagcgttggagagtagaaggtagatattagtatgaggagagataggatagttacgtagagttttatggtattggtggaaaagaggtttttttagaggtgaggttgtagaatttagaagttttagaatttagttgtgttttgtgttgatattgagttgggaatttttttttatagggattttgaggtttaggataaatgtgggggtataggagagtgagtggaatttttatggtagagatgatgttatggtttttgaagttagttgagtgaggagttttttttagttttttttttttagggcgatgttattatagaggaaagatgagggaggtgtaggcgagaagaaaagggaagtggtatagttaaaagtagtgatcgagattggggagagagttgtaaattttagaggaaaagatgaaatgtttatatttgttataagtggtttgtagataagaattgtgttgtttttggtggttggtatttttagatgttggagggtttatgttagtttttttaggttggt

SEQ ID NO: 2369 - DNA, 2747 bp, Artificial Sequence
  chemically treated genomic DNA (Homo sapiens)
gaattttagttatatttatatacgttaatttatttaattttagttataaggtaggtagtttttgttaatattttataattgtgagaacgtagagatttgggattggtttaaggtgatatattgtagtaaggagttagaatttgaattcgaagtagtgtttttttttttcgtaatagttgcggcgttataaatataggttagttacggagaaattaatgatttatagttatttttgtagttttgcgttataattggggagataagttggttttcgtgattttttagtttgtttttatttaagtgtatgattgcgggacgaaagcgattacgtgagtattttttttttattttttcgttttttttaggcgagggatagtgttaggttaaggataagttataggtgtaataacgtgttagaattggattcggagttttagggcgtaagatttttcgtagcgttattcggtagagggacgggtgtggttatcgggcgcggtagtttttgcgtgcgttgaaagtgcggttggaggcgcggacggtttttcggagtttcgagagaggagttaggaatgattttggtcgtagtttttgtaatttcgtatgacggtttttagggggatagcgaggtttttttcgatttttggttgtaattagtcggcggggttagacgatgtcgagattttagggcgaggtcgtagggagggggttgtttttttttacgtggatcggtttttcgttgggggcgtggtcgtcgaagcgggtcgggttaatgagcgttatcgtcgggtttattcggttgggtacgtcgggtcgaggagggttgcgttatgtcgggggcggggtttcggggtcggcgcgaggcgcggcggggttacgcgggtcgttgcgcgggttataagtaggggtcggcggggtgtttcgttggagtgatggttgtcggcgttttttgcgtggttttttttttcggtcgttgaaattttcgcggttgttttttgggaaggtcgtgagtttcgttgagttgttttcggtgtcgtcgattcgggtcgtgtcgtgtgttcgtggttttagtcgttgtcgtttcgattttttcgtttttcgtttcgtttttttttttttttggtgagtagtggcgtcgtttcgtaaaggttttttttttttttcggggtcgggcgcggacgtcgtggcgttggaggcggacgtcgtggcggcgcgggttggttttttttttcgtcgttggtcgtttttatttcgttcgtttgttcgttcgcggtttttttggcggttttcgggcggcgcgcgcgggaacggttttttttcgattttcgcgcggagggcgcgcgcgggttggtagcgtaggggttgggttgggcgcgcgcgggtcgcggaggattcggagttacgtgtttttttttttcgcgcgttttattggggatgggggtttggagtagtcggtagaggttattgcgggatttcgggcgcgtgggtagagcggtgttttattggttttaggggtacgtagttattgttattttttttttttttcgtaggatgaatttgcgttttttttttttttcgttatggaattttgtttcgtgtttttagtttttttgagttaaagaaattttagataatagatgtttatacgtagcgtatagtagtaattttttagttcggtttttgtgtcgtagtttatagtatttaattttatataatatatattatttattatagtatttttgatattttatattttgtttatatattttgaaaggcgtttagtagtttttttattaaataattattattttagagaatggtaacgttgattattagtattatagttgttatcgtcgtttttggttttttggtggattatttatggatgtttattttgggttttattattgtatttgttttggtatttttcgtgggagttaatgatgtagtaaatttttttggtatagttgtgggtttaggtgtagtgattttgaagtaagtttgtattttagttagtatttttgaaatagtgggttttgttttattgggggttaaagtgagcgaaattattcggaagggtttgattgacgtggagatgtataattcgatttaagggttgttgatggtcggtttagttagtgttatgtttggtaagttttttttatgttttgtttttttcgtggtgggtgaggtaaattgtattatgggtggttttatttgtgtataattttttcgattaatttttttgaatgtgttatttatataatggaattttgatatttatttaataaaattttattatgttttaggttttgttgtgtggtaattcgtggtttcgtttttgaagttttttatttttggaatttattgtattgttggtgtaattattggtttttttttcgtggtaaaggggtaggagggtgttaagtggtttgaattgataaaaattggtatgtttaatttaaacggttttttaatttcgttttcgttatatgtattatggtataggtatggaggatgtgttttaacgtcgagggatagatttaagaattttgaattttaaatatttaaagtggtttttggtttttgatttttattattgatattttttttaagtgttttatttagtgatgttttggttcgtgtttttattgttttttggaattatgtttggaattttattttttttggttcgtgtatttattttttataaggtaatttttttttcgataagattttttatggagtat

SEQ ID NO: 2370 - DNA, 2747 bp, Artificial Sequence
  chemically treated genomic DNA (Homo sapiens)
gtgttttatgaaaggttttatcggggagaaggttattttatggaggatgaatgtacgaattaggaagaataaaattttagatataattttagaaagtagtggggatacgaattaagatattattggatagaatatttaagaaaaatattaataatgaaaattagaaattaaaaattattttaaatgtttagagtttaaaatttttgggtttgtttttcgacgttagaatatattttttatatttatgttatggtatatatgacgaaaacgaaattaagaagtcgtttggattaaatatattaatttttattagtttagattatttgatatttttttgtttttttgttacgagggagaaattaatagttgtattaataatataatgggttttagaaatagggagttttaaaaacgaagttacgagttgttatatagtagaatttgaaatatagtaaagttttattaagtaaatattaaaattttattatgtaagtggtatatttagaaaggttaatcggaaaggttatgtataaatggaattatttatgatataatttgttttatttattacgaagaggataaaatataaaaagaatttattaaatatagtattgattgagtcggttattagtagtttttgagtcgagttgtatatttttacgttaattaagttttttcggatggtttcgtttattttggtttttagtaagatagagtttattgttttaaagatgttagttaggatgtaggtttgttttagggttattatatttgagtttatagttgtattaaaagaatttgttatattattggtttttacggagaatgttaagataaatgtaataatgaagtttaggatgagtatttataggtagtttattaaaggattagaagcggcggtagtagttgtagtattggtaattagcgttgttattttttggagtagtggttgtttagtaagagaattattgagcgttttttaagatgtgtaaatagaatatgaggtattaaaaatgttataataaataatatatattatataaaattaaatattgtaaattacggtatagaaatcgagttggggagttattgttatacgttgcgtatgggtatttgttgtttggggtttttttggtttaggagggttaaaagtacggagtagaattttatggcggagaagagaaaggacgtaagtttattttgcgggggaggggggaaataataatagttgcgtgtttttggggttagtggggtatcgttttatttacgcgttcggggtttcgtaatagtttttgtcggttattttagatttttatttttagtaggacgcgcgagaaggagaggtacgtggtttcgggtttttcgcggttcgcgcgcgtttagtttagtttttgcgttgttagttcgcgcgcgtttttcgcgcgaaaatcggaaaagggtcgttttcgcgcgcgtcgttcggggatcgttaaaaaggtcgcgggcgggtagacgggcggagtggaggcggttagcggcgaagagagaagttagttcgcgtcgttacggcgttcgtttttagcgttacggcgttcgcgttcggtttcggggagaagaaagagtttttacgaggcggcgttattatttattagggaaaagggagggcggagcgggagacgaggagatcgaggcggtagcggttggagttacgggtatacggtacggttcgggtcggcggtatcggggatagtttagcgggatttacgatttttttaggaagtagtcgcgggggttttagcggtcgagaagaagaattacgtagagagcgtcggtagttattattttagcggagtatttcgtcggtttttatttatagttcgcgtagcgattcgcgtgatttcgtcgcgtttcgcgtcggtttcgaagtttcgttttcggtatgacgtagtttttttcggttcggcgtgtttagtcgggtgagttcgacggtggcgtttattggttcggttcgtttcggcggttacgtttttagcggggagtcggtttacgtggggagggatagttttttttttgcggtttcgttttggagtttcggtatcgtttggtttcgtcggttgattatagttagagatcgagggggatttcgttgtttttttagaggtcgttatgcggggttatagaggttgcgattaaagttatttttagtttttttttcggggtttcggaaagtcgttcgcgtttttagtcgtatttttagcgtacgtaggagttgtcgcgttcggtggttatattcgtttttttgtcgggtgacgttgcgggagattttgcgttttggggtttcggatttagttttggtacgttgttgtatttgtgatttgtttttggtttggtattgtttttcgtttgggggaagcgggggggtgggggggggatgtttacgtggtcgttttcgtttcgtagttatgtatttgggtgaaaatagattgaagagttacgggaattagtttgtttttttagttatggcgtagagttgtaaggatggttgtgggttattaattttttcgtggttgatttgtgtttgtaacgtcgtagttgttgcgagggggaaggatattgtttcggatttaaattttgattttttgttgtagtgtgttattttgagttagttttagatttttgcgtttttataattgtaaaatgttaatagaggttgtttattttgtggttggaattaaatgaattaacgtgtgtgaatgtgattagaattt

SEQ ID NO: 2371 - DNA, 6960 bp, Artificial Sequence
  chemically treated genomic DNA (Homo sapiens)
aggttttttataaataggattttgttttagattcgtgtttttttttttttttttttttataggaatttagtttttggtaggtttgtggtgtagatagtgaatggttttgtagtggcgggatttgtttatttgtgtgtttttgtgtttgagttttttttgtttgagtttgaattttaggttggtggttatataatttaatatttttattttacggatgagaaaatagaagtttagagagggttagggatttgtttaggtttttttagttagtttatgtcggagttgtattagatatttttttttttgtgtttagagcgatggttataatatttttttttgtttgtttgaaaatttttttttatttttgttgatttgtatttattttttagtttttgtttttttagtaattagagtttacgaagaggtgattaggttttggttattttttagagtagagaaattgggggtgtaggggtgggaattgaaggggaggggtatggtaggggttgagaatgcggttgttttgtttgggggtttgagttaggttgtttatagaggagttagtatgtttagatattagagttttgtgagttgaagagtttggtgtggggaatggttgttttgttgagttatattgttttaggttgattgaatgttagtgttttagtgtttaggagttagttttttagaattagttagggttttggggagaatgtggttggggtattttagtttggattaaggaggggagggggttgttcgtgtttcgtgagtgttgagtagttttttgtggagaaaattgtagaggaggagtgagttttagcgtggatattaagagagacgagaggagtaggcgtttttgtattttggggttagagtagaagggtttggttagagtggaggatggatagaggtaggatagggatttttggaggttggtgtttttttgttagggtattgggagttttgaggatagagcgattaaatttttatttataaaggaagagttaggagaattatggggattaggagggggtcgagaggttttgggggttggttaggcgggtggggtgggttagatttatagttgtttagatgtgggtaagagataattttgtttattgggtatttagtgggagcggggtggggggtgtgggaaggggtttttagggttagtggggcgggtagattaggaggcgggggtatgagttaggggtttgcgagttgtttttggggcgttggtgttgttagaacgagtgggaacgtagttggtcgtagagggtattagcggttgtaggattttattaagggattttgaggttcgtgagtaggtgggtagggtagggaggggttggggatggttttcggtgtttcgtttgagggtttttataggtgtttagtttgaatttatgtttaggtgggttaggtttttgatttttaagggggtgtaggtgggtggggtgagaatgttattatgtatatgttgtttttaaggaataggtttattggtatttgaaaagaggagggtggtaggtggttaatggtagtagatggtatgtgtggtttcggtgcgtgtgttgcggggggtatttgattttttttaggtatgggtttttgttagtttgttggattttatagggttaggttttgtttattttagatttttttttttttaatggggtttttagattatttttttttttatttaggaggtaggatgttagttgatatagtattttttttggatatttttaggggtttatttggggtatttggttttatttttagcggttagtattggagggaattgtagagttttttattatatgagaattttaaaatatttagtttaggttaattttatgggaattgagggtaaattagaggggaaatgaagatggtaagtttgattgtaattttagtagtaagggataatgatagtaaatatttttatagcgttttttatatgttaggtattgttttaagttttttataaatgtaaatttttttaatgtttataataggtttatgagatgggtattattattattatttttattttatagatgagaaaattgaggtatagagagttgaagttatacgtcgttagtaaatggtagggttgggttttgaatttaggtagttcgattgtagagttcgtagatttttaataattaattttaaattagttaatagttgttttgttggaggtaatttagtatagtgtttagggatgtggttggagttaggtagtttaggttgtaatttggttttgatatttatttgttgggtggttgaagtaggtaaatgtttttgaattttagttttcgtatttgtagaatggattaatgatattattttttttttttttagattttaaattattttatagaatgttttggggattttaagagttaaggtagtatagttttttgtgtagttcgggttgattatataaaggtggtgttatattattaggaagttgtttttgttatttggttaattttttttttcgtcgtgtttttttagttgtgttatattttttaggtttagatgtttcgtttatttttatttggtttggttttggtagttggttagttgcgatgtttggtgtatttttaaaatttggggtagcgatttgggtttaggtttttattagtgttaggtagtataaggtttgtagttggggggcggtttggttggcgggtggtaatttgggttatgggtgttttttgtaagtttttaattgagtttaaggtatttttgtttttttttttttttttttattgatgttttagaattttggtaggaaggtatttttattgtatagatggggtgattgaggtttataggttggaagttgtttaaggttttttagttagttagtggtagagaggtagtttggatttttggattttgtagttttgagggtttttttgattattttattttttagataggtaattaaggttatagttttagttttatgggtgggatttttagtatttaaggtttagatattttggaggttttagtatttgaggtttaagaaagtgtatgggtaagtttagagaaggaagaaagtgaataaagatggaagagaaagatggaagagaaagaggaattttgggagaagtagagagggaggaggaaaaagagagagaagaggtgggttattagggtttttaggagtaaagttaagttttgtagtagggattatttcgtttttaggtttaggatttttttttcgtattttattatttgttttatttgttaaggtaggggttttttttattttttagtttggtgagatttagtaattttttttttatttttaggattgtagggttatttattttttagaaagaaggttgtttgtatattttttttttttttttttttttttttttgagacggagtttcgttttgttgtttaggttggagtgtagtggcgtaatttcggtttattgtaatttttgttttttggtttaagggatttttttgttttagttttttgagtagttgggattataggtatgcgttattacgtttggttaatttttgtatttttagtagagatggggttttattatgttggttaggttttttgttttatgtttttacgtggtatttttttattttgtttagtttatttgtttagttttatttaggtatgttttatatttggatttttagttttttatattttattagtgtttggttgggtacggtggtttatatttgtaattttagtattttgggaggtcgaggtgggtggattacgaggttaggagattgagattattttggttaatatagtgaaatttcgtttttattaaaaaaatataaaaaattagttgggcgtggtggcgggcgtttgtagttttagttattcgggaggttgaggtaggagaatggcgtgaatttaggaggcggagtttgtagtgagttaagatcgttttattgtattttagattgggagagagagtaagattgtgttttaaaaataagaaaaatttatttgtgtttttacgtagcgttagtgattttttttcggtgattttattttcgagtgttgtaaacgcgttttgtttttttttttgttatatagatttttggtatttagtattttcggttttgggtttatgttatttcggaagtattgaggttgttttgtgtttttagtttgtttttttgtgggaggttaggagttttttttagagtagagacgggttttgtttagtttagtatttttttttattagtttttagtgtttagtatttttttttattagtttttagtgattagtaggttttttttatagtttttagtgttcggtatttttttttatagtttttagtgtttagtattttttttttatagtttttagtgttcggtattttttttttatagtttttagtgtttaatataatgttaggtatagagtgggaatttttgttgaatcgatttaattgtttgttattttaatgttttgtgttgtagtggggcgaggagggaaaagaggtatttttatatttagtttgggttattttaggtgatttttgttttttttttggatttgtttttatatttttggggaaggtatatttttttttttgttagggatataattgagaaaattgagatttcgagtttagaggttttttggttggggtttagttattttggttttttagttttagagttttaatttcgtaatagggagttatttttataattatttagtaaatgtttattgagtatttattacgtgatagttattttgttaggagtagtgaatttcgtggggatgggatatatagggttttcgtatttaggtagttttttttttaaaagtattgttagataatatgaatataaattaattaagaaattacgtattggtttttttgttttgttttgttttttttattaaagagttttattttgttatttaggttggagtgtagtggtgttattttggtttattgtaatttttgttttttagggtttaggtaatttttttattttagttttttaagtagttgggattataggtatacgttattatatttagttaatttttgtatttttgtagatatgtggttttattatgttgtttagttggtttcggatttttgagtttaagtaatttgtttgttttagttttttaaaatgttaggattataggtgtgagttattacgtttaattaagaaattattaaaaattagttaggtatggtggtgtgtgttagttattttggaggttgaggtgggaggtttatttaagtttaggagtttgagattgatgtgagttgtaattatgttattgtattttagtttggataatatagggagattcgtttttaaaaaaataaaaaagaagaaagaaattagtagtttatattgagatagtgagattttgttttatatatagttttttttttttaaattatttgggtattgtggtatgtttataattttagttatttaggaggttgggttaggaggatttttggggttttaggagtttaaggttgtagtgaattatgattatgttattgtattttaagtttgggtgatagagtgagattttgttttaaaaaggaagagagagagagaggaaggaaggaaggaagtagggatggaggaaggaaggaaggaaggaaggaaggaaggaaggaaggaaggggagggaggggagggagggaaaagaaaggagaatatgatagattgggttaaggtggtggttagggagggtttttgaagaggagatatttgggtcgagatgtgagaaggtttgaggtattggggggagggtgttcgggatatggatagttggatgtgtaaaggttttgggataggaaagggtttagtgagttttaggaattataggaggttaataggttaggtggggagagagcgagagagacggagtgtaagatggggttagggagagaagtaggattattcgtttagattgcggattatttttaaggatgttgtagtttattcggtgggtagtagttatttttgagagaagagtatgtgtttagagtttttaggggagttaagtttttttgaagaagagattagtaggttttttggtattagttgagttttagggatgggtaagaaaagaagttaggtgaagattagagaatgaaggagggagatggatttgagggtgatttgtttattttttttaaatatttttcgttggtgttagttagatttattttttttttgtattgttttttttttttagtttttgtttatttatttttatatttgtaaatttagttcgttttttttttttttttatattttttttttttggttttattatttttaatacgtggattttttttattgatatgtggttttttttggaggaggattaggagattttgggatgttttgtgttttatttagtttgtgttttttgttgtagggattcgcggtgcgggttatgttgggggtttagattatcgtagataattggatatttaggattacgttatggaggagttgtaggtgggtgttttttggtattagtagtgtttttatttggaggttttggggatttggttttagatttttattttcgttgggggtggaagagttttttatagtttagttttagcggttattttttataggatgattatgaagatatgatggaggagaatttggagtaggaggaatatgaagatttagatattttcgagttttagatggaggagtcggtaggtgagttttttttttttttttagttgggatgagttgttgagttttagatagggataggaggggtatttgttttttttttttttttatagttttttttttaagtattacgggtcgttttttttttaattttggttgattgaaggataaatagagttttgtttgaaatgattataggaggtggttgggagagtaggggtagttatttat

SEQ ID NO: 2372 - DNA, 6960 bp, Artificial Sequence
  chemically treated genomic DNA (Homo sapiens)
atgggtgattgtttttgtttttttagttattttttgtgattattttaaataaagttttgtttattttttaattagttagaattgaggggagaacggttcgtggtgtttgggaggaggattgtggagaaggggagaggataagtgttttttttgtttttgtttagggtttagtagtttattttagttgagggagggagaggggtttatttgtcggtttttttatttgggattcggggatgtttgggtttttatattttttttgttttagatttttttttattatgtttttataattattttgtgggaagtggtcgttgaggttgggttgtgaggggtttttttatttttaacgaagataggagtttaggattaggtttttagagtttttaggtgggagtattgttgatgttagggaatatttatttgtagtttttttatggcgtggttttgagtgtttagttgtttacggtgatttgagtttttagtataattcgtatcgcgggtttttgtagtagagggtataggttgagtggggtatagggtattttagggttttttggtttttttttagagggggttatatgttagtggaggggatttacgtgttggaggtggtagggttagaggaaggaagtgtggagggaaagggagaacgagttggatttgtaggtgtgagggtaggtgagtaggggttgggagagaggggtagtgtagggaagaggtaagtttggttggtattagcgaaggatgtttggggaagatgggtaggttatttttaggtttattttttttttttattttttagtttttatttggtttttttttttgtttatttttgggatttagttaatattaggggatttgttggttttttttttaggggggtttagtttttttgagggttttaaatatatgttttttttttagaaatagttgttgtttatcggatgggttgtagtatttttgggagtggttcgtagtttggacgagtggttttatttttttttttgattttattttgtatttcgtttttttcgttttttttttatttagtttattggttttttgtggtttttagaatttattaagtttttttttgttttagggtttttgtatatttagttgtttatatttcggatattttttttttaatattttagatttttttatatttcggtttaaatgttttttttttagaggttttttttggttattattttgatttaatttgttatgttttttttttttttttttttttttttttttttttttttttttttttttttttttttttttttttttttttttttttttatttttgttttttttttttttttttttttttttttttttttttttgagatagagttttattttgttatttaggtttagagtgtagtggtatgattatagtttattgtagttttgaatttttgggattttagggatttttttggtttagttttttgagtaattggaattataggtatgttatagtgtttaggtaatttaaaaaaaaaaaattgtgtgtagaatagggttttattattttagtgtgggttgttgatttttttttttttttttatttttttgagagcgggtttttttgtgttatttaggttagaatgtagtggtatgattatagtttatattagttttaaatttttagatttaagtgaattttttattttagtttttagagtagttagtatatattattatgtttgattaatttttaatggttttttggttgggcgtggtggtttatatttgtaattttaatattttgggaggttgaggtaggtagattgtttgagtttaggagttcgagattaattgggtaatatagtgaaattatatgtttataaaaatataaaaattagttgggtgtggtgacgtatatttgtagttttagttatttgagaggttgaggtgggaggattgtttaagttttgggaggtagaggttgtagtgagttaagatggtattattgtattttagtttgggtgatagagtgagattttttagtaaggaaaataaaataaaataaaaaaattaatacgtggttttttgattgatttgtgtttatattatttgataatgtttttggaagggaaattatttgagtgcgaagattttgtatgttttatttttacgaaatttattatttttagtagagtggttgttacgtagtaggtgtttaataaatatttattgaatgattgtaagaatggttttttattgcggggttggggttttgagattggggagttaggatgattaggttttagttaagaggtttttgagttcggggttttagtttttttagttgtgtttttagtagagaggaaggtgtgttttttttaggaatgtgagggtaggtttaaggggaggataggggttatttaaggtggtttagattgggtgtggaggtgtttttttttttttttcgttttattatagtatagggtattgaggtgataggtaattgggtcggtttaataaaggtttttattttgtgtttggtattgtgttgagtattggaggttgtggggagggggtgtcgagtattgggggttgtggggagggggtgttgagtattgggggttgtgggagggggtgtcgagtattgggggttgtggggagggtttgttgattattgggggttggtgggagggggtgttgagtattgggggttggtgggagggggtgttgagttgaataaggttcgtttttattttgggggaagtttttagttttttatagggaggtaaattgggaatatagggtagttttagtgttttcgaggtgatatggatttagggtcgaaagtgttgagtgttaaggatttgtatggtaggaagaagagtaggacgcgtttgtagtattcgggggtggagttatcggagaggggttattggcgttacgtaaaaatataggtgagttttttttgtttttgagatatagttttgtttttttttttagtttggagtgtagtggagcgattttggtttattgtaagtttcgttttttgggtttacgttatttttttgttttagtttttcgagtagttgggattataggcgttcgttattacgtttagttaattttttgtatttttttagtagagacggggttttattgtgttagttaggatggttttaattttttgatttcgtgatttatttatttcggttttttaaagtgttgggattataggtgtgagttatcgtgtttagttaagtattggtgagatgtgaagggttgggagtttagatgtgaggtatgtttgggtggagttgaataggtgggttgagtaaggtgggaaaatgttacgtgagggtatggggtagggagtttggttaatatggtgaaattttatttttattgaaaatataaaaattagttaggcgtggtggcgtatgtttgtaattttagttatttaggaagttgaggtaggagaattttttgaattagggggtagaggttgtagtgaatcgagattgcgttattgtattttagtttgggtaatagagcgagatttcgttttaaaaaaaaaaaaaaaagaaaaaaaaggatgtgtaaatagttttttttttgaggaatgggtgattttgtagttttgggggtagggaggggattattggattttattagattggagaatgggagagatttttgttttggtaggtggggtaagtgatggggtgcgggggaggggttttggatttgaggacgaggtagtttttattgtagggtttggttttgtttttgaggattttgatgatttattttttttttttttttttttttttttttttttgttttttttaaagttttttttttttttttattttttttttttatttttatttatttttttttttttttggatttgtttatgtatttttttaggttttagatgttaaggtttttagggtgtttaagttttaggtattaaaagttttatttatggggttgggattgtggttttggttgtttatttgaggagtggaatggttagaggggtttttagagttgtagaatttagaggtttaggttgtttttttgttattgattggttgaagggttttgggtagtttttagtttgtaggttttagttattttatttgtataatgggagtgtttttttgttagggttttgagatattagtgagagagaagaggggaaaatagaggtgttttgagtttagttggagatttatagggagtatttatgatttagattgttattcgttagttaggtcgttttttagttgtaggttttgtgttgtttagtattgataagggtttggatttagatcgttgttttaagttttggaagtgtattaaatatcgtagttagttagttgttagggttaggttagataagggtgagcgggatatttgagtttagaaggtatagtatagttgggaagatacggcgggagaggggattgattagatgatagggataattttttagtggtatggtattatttttgtgtaattagttcgaattgtataaagaattgtattgttttaatttttagaatttttaaagtattttgtgaagtggtttgggatttaagaggaagaagagtaatgttattaatttattttatagatgcgaaagttgaggtttagagatatttatttgttttagttatttagtaggtaggtattagagttaggttatagtttggattatttgattttagttatatttttaagtattatgttaagttgtttttaataaaataattgttagttggtttagagttagttgttaaagatttacggattttgtagtcggattgtttggatttaaagtttagttttgttatttattaacggcgtgtgattttaattttttgtgttttagtttttttatttgtaaaatgggggtgatgataatgatgtttattttatagatttgttgtaagtattaaggaaatttatatttgtaaggggtttagaatagtgtttagtatataaggagcgttatgaaaatgtttgttgttattattttttgttgttggggttatagttagatttgttatttttattttttttttgatttgtttttagtttttatggaattagtttgagttaagtgttttgagatttttatgtggtaggaggttttgtagttttttttaatattgatcgttgggggtggagttaggtgttttaggtagatttttggaagtgtttaaaggggatattgtgttagttgatattttgttttttaggtgggagagggggtggtttgaggattttattaggaaggaaggagtttggggtggataagatttgattttgtgggatttaataagttgataagggtttatatttggaggggattagatatttttcgtaatatacgtatcggagttatatatattatttgttgttattgattatttgttatttttttttttttaggtgttaatgggtttgttttttaggggtaatatatgtatggtaatatttttattttatttatttgtatttttttggaggttaggagtttggtttatttgggtatagatttaggttgggtatttgtagaagtttttaggcgaggtatcgaagattatttttagtttttttttgttttgtttatttgtttacgagttttagggttttttggtgaagttttgtagtcgttggtgttttttgcgattagttacgtttttattcgttttgatagtattagcgttttaggggtagttcgtaaatttttgatttatgttttcgttttttaatttgttcgttttattggttttgggagtttttttttatattttttatttcgtttttattgggtgtttagtaaatagagttattttttatttatatttggatagttgtgagtttggtttattttattcgtttggttagtttttaaggtttttcggtttttttttggtttttatggtttttttgattttttttttgtggatgaaggtttgatcgttttgtttttagggtttttagtgttttggtaggaaggtattagtttttagaggtttttgttttgtttttgtttattttttattttggttaggtttttttgttttggttttaaggtgtaagggcgtttgtttttttcgttttttttggtatttacgttaggatttattttttttttgtagttttttttatagggaattgtttagtatttacggggtacggatagtttttttttttttttgatttagattaggatgttttagttatattttttttaagattttggttggttttaaagagttggtttttggatattaagatattgatatttagttaatttgaaataatgtagtttaataaaataattattttttatattaagttttttaatttataaagttttaatgtttgggtatattggtttttttgtaggtagtttggtttaggtttttaggtagaatagtcgtatttttagtttttgttatgttttttttttttagtttttatttttatatttttagtttttttgttttggggggtgattagagtttggttattttttcgtaggttttggttgttaaagaggtagagattgaaagatgagtatagattagtaagaatgaagaggggtttttaagtagatagaaaggggtgttgtggttatcgttttgggtatagagaggagggtgtttagtatagtttcggtatggattggttgaaggaatttggataagtttttggttttttttgggtttttgtttttttattcgtaaagtgagagtgttgggttatgtggttattagtttgaagtttagatttaagtagaagaaatttaaatatagggatatataggtggataaatttcgttattgtaagattatttattatttgtattataagtttgttaggggttgagtttttgtggagagagaaaaggggagggatacgggtttgaggtagaattttgtttatggaggattt

SEQ ID NO: 2373 - DNA, 719 bp, Artificial Sequence
  chemically treated genomic DNA (Homo sapiens)
ttgttttaattacgtgttgtatttttaaagtttagatatgtttagtatatacgagatgttcgatgaatagttattgattgaatagattagatattaacgtaattaggttgtttatttagggattttttgttaggcggcggagaggtacgttatagttttttacgtaaaatagatgcgcgaaagattcgggaagtgtgatcggaaaggggcggagtattagggagagtttcgcggatataggcggttcggcgcggaaagcgggaggtggaggggcggtttggggtaagcgcgcgcgcgtagtgtagaagttagtttttcgcggttgaggtatttaaggtgtttaaaggcggggtagtgatttcgcgcgtgcgttgtgttcgcggtagcgtcgggttttagtgtgtgggttgttgttggtatcgtacggcgcgtgcgtagtgaggacggcggagggatttgcggtcgggatttattttttgttttagtcgttatcggaggtcgcgcgggtggttgagtagcggtttggtgcgttcgtttagcgggcgacggaattagacggacgtggacgttttcggagtggaagtcgaagtaggagttgttgttgttgaggggttgtcgtagtcgtcgcgagttttcggatagacgttagagcgaggagggcgttacgcgtgagtgagtgtgattgagtggttcgacgggtgcgggttcgttatttagaa

SEQ ID NO: 2374 - DNA, 719 bp, Artificial Sequence
  chemically treated genomic DNA (Homo sapiens)
ttttgggtagcgggttcgtattcgtcgggttatttagttatatttatttacgcgtagcgtttttttcgttttggcgtttgttcggaggttcgcggcggttgcggtagttttttagtaataataatttttgtttcggtttttatttcgggggcgtttacgttcgtttgatttcgtcgttcgttaagcgagcgtattaggtcgttgtttagttattcgcgcggttttcgatagcgattggagtagggggtgggtttcggtcgtaaattttttcgtcgtttttattgcgtacgcgtcgtgcggtgttaataataatttatatattaggattcggcgttgtcgcgggtatagcgtacgcgcgaggttattatttcgtttttgggtattttgagtattttagtcgcggggggttggtttttgtattgcgcgcgcgcgtttgttttaagtcgtttttttatttttcgtttttcgcgtcgaatcgtttatgttcgcgagattttttttgatgtttcgttttttttcgattatatttttcggatttttcgcgtatttgttttgcgtagagaattgtaacgtattttttcgtcgtttagtaaagagtttttaggtgaatagtttgattgcgttgatgtttaatttatttaattaataattatttatcgagtatttcgtgtgtgttaggtatgtttgggttttgggggtatagtacgtgattaaagtaa

SEQ ID NO: 2375 - DNA, 848 bp, Artificial Sequence
  chemically treated genomic DNA (Homo sapiens)
tatttttgtatatttattatagaattttttagtatcggttagaaatttttttaagattatattattttggggtgggggtttgtaaaaattaaatattatttttaaattttaggaagatattaagtttttttatttttgaatatagaaatataattaagatttcgaagttatgtatttatttatttgattttatgaatatttattgatttgttattttgtgttttaataagggtttggggatttaattaaaggagtagttacgtatagtacgttaggtgttaggattgtcgaggttatatatatagagtgcgaacgttaatttagatagttttcgaggatggtatatagtaaatgaaattttttgcgaaaagaagaaaacgtgattgatggaaaggggtggaaacgggagaaagtgacggtaaatgggaaggtgtagtgttttttagaggaaaattatattttataagttttttttattgttagagtacgattggtaaggataatcgtgttgagtagtgttattttttaagaataggtggtattgttcgtatttggaatatttagacgcgttttttttttgggattattattcgcgggttagtatagacggttcgttttcgttcggcgtttaattgtacggttcgaggattttgtttttgcgcgttttattttcggtattcggaattttacggttatttattttgcgcgtaggattcggaagggttaggcgggggcgcggcggtgtagtttttttcgagcgcgttgggtcgtttttgttcggtttggggtttgttaggcgcgattttttcggtgtagtcgagttttttcgtagattttgcgtcggaaag

SEQ ID NO: 2376 - DNA, 848 bp, Artificial Sequence
  chemically treated genomic DNA (Homo sapiens)
tttttcggcgtagagtttgcggaggggttcggttgtatcggggggatcgcgtttggtagattttagatcgagtagaggcgatttagcgcgttcgggagaggttgtatcgtcgcgttttcgtttagttttttcgggttttgcgcgtagagtgagtggtcgtgaggtttcgggtgtcgggggtgggacgcgtagggatagagttttcgggtcgtgtagttggacgtcgggcgaggacgggtcgtttgtgttgattcgcgaatagtgattttagaggaagaacgcgtttgagtattttaagtgcgagtagtgttatttgtttttgggagatggtattgtttagtacgattgtttttgttagtcgtgttttggtagtgaagaggatttgtgaaatataatttttttttagaaggtattgtatttttttatttatcgttattttttttcgtttttatttttttttattagttacgttttttttttttcgtagaaagttttatttgttgtatgttattttcgagagttgtttaggttaacgttcgtattttgtgtatataatttcgatagttttggtatttaacgtgttgtgcgtagttgtttttttggttgaatttttaggtttttgttggggtataaggtggtaggttagtaaatgtttatggaattagatgaatgagtatatgatttcggaattttaattatgtttttatgtttaaagatggaagggtttaatgtttttttagagtttaaaagtgatgtttagtttttgtagatttttattttaaaataatatagttttaaaaaaatttttggtcggtattgaagagttttgtggtaggtatgtagaggtg

SEQ ID NO: 2377 - DNA, 5040 bp, Artificial Sequence
  chemically treated genomic DNA (Homo sapiens)
  unsure 3990, 4007, 4036, 4079: n is a or g or c or t
tttatttttaatttaattatttaatttttaatttttaagatggagttttattttgttgtttaggttgaagtgtaagggtgtaattttagtttattgtagtttttgtttttcggattttagtgatttttttgttttagttttttaggtagttgggattgtaggtatatgttattgtgtttagataattttttgtattttttagtagagacggggttttattatgttggttaggttggttttgaatttttaattttagatgattcgtatatttcggttttttaaagtgttaggattataggtatgagtttttgcgtttggtttttattttagttttaaagagtgaaggttaagatattgtttttttttatgttttgtttttaattttgttttaaattttttttgtagagatgggattttgttatgttgtttaggttggtttcgaatttttggtttttagtaatttttttgttttagttttttagagtattgggattataggtgtgagttattgtgtttgattaagatgttgttatgggttgagttgtgttttttaaaaatttttttgaagttttaattttaagtattttaggacgtgattttattttgaaggatttttttatagggtttttatagaggtaattaagttaaaatgaggttattaggatggggtttaatgtaatatgattggtatttttgaaaaaaggggaaatttggagattgatttgtatataaagagaatagtgtgtgaacgtgaaaatggttaaggagggaggtttggaatagagtttttttttatatttttgagaaggaattaattaattttgtttaggttaattttgattttggatttttagtttttagtattttgagagatttttgttgtttaagttatgtaatatgtagtattttgttatagtagttttagtaaattgatatatttattaaatcgattttgtgatttattattgggttgtaattagtagtatatagatataaagttattttttttttacgttttattttgtgtaatcgtgtgtgtgtgtgtgtgtgtgtgtgtgtgtgtgtgtgtgtgtgtgacggagttttgttttgttattaggttggagtgtagtggtttgatttcggtttattataattatagttttttagatttaagtgatttttttgttttagttttttgagtagttgggattataggcgcgtattattacgttcgattaattttttgtatttttagtagagacggggttttattatgttggttaggatggttttaattttttgattttgtgatttgtttgttttagttttttaaagtgttgggattataggcgtgagttttttttgtgtaatttttattattatttaatgggatgttaaggtttaggggagggtgatatagttatttttatagttatgtaggtgtagatgttattaatgaaggtttgatagattttgtaattgtataatttgaagatgagtatttttttaaattttatattttaggtattttattttagtttagattttgttgaagtaggtataattattatttttatttgagggattgatatttgattgtgaattttttaaatggagttatatttaagttagatttgtttttaaattttgttttttttttttatattatagtgtttttattggtatagttagttatagagggagtaatatatattatttttttattagtatttgtttttcgtttttttattttttaaaaggagttaaagttagagattatatttatttttttttttttttttttttaagtttttggggatttgtagttttgatatttttagatggtgaaatttggttttatttattgtttgtggatgtttgtaggtagagtgggtatttaggagtatatataaagtacgtgtgtcgtgaatacgtatgtgtatatattttgattttagtatggtttgttggataagttaatggatagagtttttgtttgttatttttatttttgttttttttttttttttatttattgttttgtagatatagtaaatatatacgtatatatatttttaatatttttttggtagtaatatgatttttaaatttggggatttttatgtaggatggagattttttttttttttttatatttggtttattatgaattataaaaatagtgtttgatagttattgtgtgttaggtattgttttaagtttttagatgttttattgtattttatttttatattatgggttaagatttatttgttttattttatagatgacgagaatgaattatagagtaaattgtttagggttgtgtggttagtagtattagtaggatttgaatttaagtagtttgtatttatagtttagttttttaattgttatattttgttgtgtttaaattttttgttgtttggttgggtttatatacgtgtatttatgtatagatttgcggggtagtaagggatggaggaggaggagttggttttggaaattaatttaggtattagggggtagtataggtttagttttggttttttagtttagtttttgttatgggagggaggaggggagtagaaatttttttttatcgttttttagatattattttttttatatatcggggtttttaggtgttcgggagtaaaggtttttttggattttttggttttttttagttttttttttagtaaaaattgtagaattttttattagttatgttgatgatttagaagttgagtaagattgtgtgtgtgtgtgtgtgtgtgtgtgtgtgtgtgtgtgtgtgtgtgtggtgttgtgattgtaatgggttttgtttgtgagtttgtttgtacgtgtgtgtgtgtgtgtgtgtgtgtgtgtgtgtagttttgtggttagggaagttgtgtatgtgtgtgtttgttttttggcgtgttttagtgtttattttagaaatatataggaatttggtagataggaatatagtagattcgtatttaaatttgttttttgtgaatttgtaggtagtagtttcggtttgtgttggtttttattatagttttaggaggggtgttttgtgaggagagagtaaagattagttttagtttaagggatttttagagttttttagaattttgagttgagggttttttttttttattttttttcgttagtggttacgagatcgatttttaaggcgttttttgtcggaagggagggggatttaggagttggttggtatcgagttttttggcggttttttagggttttttattggagggagcgtagagtttagagggatttattttttttgaggttttggggagtttagttttttgtgggtttaaattttagtttttggtagagtttgagtttgggagttaggtagttaggggtggtaaatttttgtttgatattgggtgattttttggagaaaagttgatgtttttgagggggatagagtaagtgggggttagtttttttttaagtttggttttaaggtttggattttagttttgattttttacgtgtttttttattcggtataggaggtatatatatttattttatttttttttttttttttttttagtttatttttttttttttgtgtcgttagagttttagggagggatttgggtagaaggagaagtcggaaatagcgggttggggtagttattgtttatattgaagagggaggacgggagaggagtgtgtgtgtgtgtgtgtgtgtgtgtgtgtatgtatgtgtgtgttttattttatttttttttttggtggtggtgttggaaggggggaggtgttagtagggttagttttgaattcgttggatagagttatagatttatggggtttggaagtgttcgttgagaaagggagaagatagtagaggggttgtcgaggtgaggggttgttttcgaggtgggtgcgggggtttttatgagtgtatgggggtggattcgtggggggagttttcgggatttttttttggttgggtggatggtttttaangagatggttttagttantgttggtggttggtggtattgggttttantagtttcgaatttttggaggaattgggagggtttaggttttantattttttttttttatgggttacgtttttatagttttatttttgtatttttaagggtttatggaaagttagggaaaggaggtgaaggagtgtttttttgttttgagtcgggggaagtggtcgtttttttttggaaggttgatcgtagagggtagtggatttttgttaaatttttattttgttttttattaaaggtttttgtttaagggtgtggttggggcgtgagtaagttttagatgtagattttatggtggtttagacgagggggaattttttttttaaaattgttttacgtttggttcgtgtagacgttgagattttttagcggcggcgtcgaattaatttttttcgtgttgaattggttttattttttcgttttgtttttatcgttatatttacgtattgggtaatttagagaagatgttttaattttcgattttgtggtttataatgagaggattcgggtagataggggttgagataagcgagtttaggttattaagcgggcggacgaggattttagattttgcgttttttttttgagtttgggaggtaatattggtttcgttttttacgtcgtggtttttttttttttttttttttaaggggttgaagataaaaggtgtttttgttttggttaagttaatcgatttagttttgttatgggttggggtggggaaaaatgagtttttttgatggttggggaagaagaggggttggatatttttagttagggttatgttaggaggttggttattttgtaaggggatgtagaggaaagcggagtttatttattttagaggatttttttttttttgggttagagaaaggtttattggaggaatttgagtaggaggggtaaggattttgttttgaggagaaaagagttggggtaagtgggtattggaggaaagaggggtatgaaggttttggagtagaaacgtttagagaagggatttttt

SEQ ID NO: 2378 - DNA, 5040 bp, Artificial Sequence
  chemically treated genomic DNA (Homo sapiens)
  unsure 962, 1005, 1034, 1051: n is a or g or c or t
gagaggttttttttttggacgtttttgttttaagatttttatgttttttttttttttagtgtttatttattttagtttttttttttttaaggtagaatttttattttttttgtttaggtttttttaataggtttttttttagtttaagaagagaaaggttttttggagtgagtgggtttcgtttttttttgtatttttttgtagagtgattagttttttggtatggttttggttagaaatatttaatttttttttttttttagttattaggaggatttatttttttttattttaatttataataaggttgggtcgattggtttgattaggataggggtattttttgtttttagttttttgaaggggaagggagggaggagttacggcgtgaggggcggggttagtgttattttttaaatttagaagggaagcgtaaggtttgggattttcgttcgttcgtttggtggtttaaattcgtttattttaatttttatttgttcgagtttttttattgtggattataggatcgaaagttaaaatattttttttgagttgtttaatgcgtgaatgtggcggtgggggtaaggcggggaggtggagttagtttagtacgaggagggttaattcggcgtcgtcgttgggaaattttagcgtttatacgagttaagcgtggagtagttttgagggggaaattttttttcgtttgggttattatgaggtttatatttggggtttgtttacgttttagttatatttttgaataggaatttttagtggagggtaggataggggtttaataaggatttattgttttttgcgattaattttttagggaggggcggttatttttttcgatttagggtagaggggtatttttttattttttttttttgattttttatgggtttttgggggtgtaggggtgaggttgtgaaaacgtgatttatgggggaggggagtantgaggtttggatttttttagtttttttaggagttcgaaattgntaaaatttagtgttattagttattaatantagttgaaattattttnttggggattatttatttagttaggggaggatttcgagagttttttttacgaatttatttttatgtatttatagaggttttcgtatttatttcggaggtaattttttatttcggtaatttttttgttgtttttttttttttttagcgggtatttttaggttttataggtttgtagttttgtttagcgagtttaaggttggttttgttagtatttttttttttttaatattattattaaaaagaaaaataagataaagtatatatatatatatatatatatatatatatatatatatatatttttttttcgttttttttttttagtgtaagtagtggttgttttagttcgttgttttcggtttttttttttatttaggtttttttttggagttttgacgatatagagaagagaaagtgggttggaggaggaagaggaagaaagtggggtgaatatgtgtgttttttgtgtcgagtgggggaatacgtgggggattaggattggggtttaggttttggagttaggtttggggggaggttgatttttatttattttgttttttttaaaagtattagtttttttttagaaagttatttaatattaaatagagatttgttatttttaattgtttggtttttaaatttaaattttgttaagggttggggtttggatttataagggattgggttttttagggttttaggaaaagtaaatttttttggattttgcgttttttttagtggaggattttaaaaagtcgttagggagttcgatgttagttaatttttaggtttttttttttttcggtagggaacgttttagaggtcggtttcgtgattattgacgggagggagtgggggaggggaatttttagtttagaattttggaagattttaggagttttttggattgaagttggtttttgttttttttttatagggtattttttttgagattgtggtgggaattagtataagtcggagttgttgtttgtagatttataaggggtaagtttgaatacgaatttgttgtgtttttatttgttaagtttttatatgtttttggggtaaatattgagatacgttaagaaataaatatatatatgtataatttttttgattataagattatatatatatatatatatatatatatatatacgtgtaggtaggtttataaatagagtttattgtaattataatattatatatatatatatatatatatatatatatatatatatatatatatagttttgtttaatttttgagttattaatataattagtggagggttttgtagtttttgttgggggaggagttggaggagattaagggatttagagaggtttttattttcggatatttgagagtttcggtgtgtggaagaggtggtgtttgaggggcggtgggaggaagtttttatttttttttttttttttatagtaggggttgggttgaggggttaaagttaggtttatgttgttttttggtgtttgaattgatttttagaattagtttttttttttttattttttgttatttcgtaggtttgtgtatgagtgtacgtgtgtggatttagttaggtagtagagggtttgaatatagtaaaatatagtagttaaaagattggattgtggatataggttgtttgggtttaaattttgttaatgttgttaattatataattttgagtaatttattttgtgatttattttcgttatttgtaaaatggagtaaataagttttaatttataatgtgagaataaaatgtagtaaaatatttgaaggtttagaataatgtttgatatatagtaattgttaggtattatttttatggtttataataaattaggtatgaggaaaggagaagggtttttattttatatagaagtttttagatttgggggttatgttattgttaaaaggatattgagggtgtatgtgcgtatgtgtttgttgtgtttgtaggatagtgaatggaagagaagggagagtaggggtggaggtggtaggtagggattttgtttattggtttgtttaataagttatgttaggattaaggtgtgtgtatatacgtgtttacggtatacgtgttttgtatgtgtttttgagtgtttattttgtttgtagatatttatagatagtaggtgaagttaggttttattatttaagggtgttagagttataagtttttaaagatttggagaggaggagggaaaagagtaaatgtgatttttgattttggttttttttagggggtaggaaggcgaggagtaagtattggtagaaaaatagtatatattattttttttgtaattgattatattaatgggaatattgtgatgtaaggggaaaaaatagaatttagaggtaaatttggtttgggtatgattttatttaggaggtttataattaggtgttaattttttaaatgagaataatagttatatttattttaatagagtttaggttagggtaaagtgtttagagtatgaaatttaaggagatatttatttttagattgtataattgtagggtttgttagatttttattaatgatatttgtatttgtatgattgtgagggtgattgtattatttttttttggattttgatattttattgagtggtggtaaagattgtataagagaggtttacgtttgtaattttagtattttgggaggttgaggtaggtagattataaggttaggagattgagattattttggttaatatggtgaaatttcgtttttattaaaaatataaaaaattagtcgggcgtggtggtgcgcgtttgtagttttagttatttaggaggttgaggtagggaaattatttgaatttggaaggttgtgattatagtgagtcgagattaagttattgtattttagtttggtgatagaataagatttcgttatatatatatatatatatatatatatatatatatatatatatacgattgtataagataaagcgtaaggaaaaaataattttatgtttatgtattgttggttataatttaatagtgagttataaaatcgatttggtgagtgtattagtttgttagggttgttgtaataaagtattatatattgtatgatttaaataatagaaattttttaagatgttggaggttagaagtttaagattaaggttaatttgagtaggattgattgatttttttttagggatgtgaaggaaggttttattttaggtttttttttttggttatttttacgtttatatattgttttttttgtatgtaagttagtttttaagttttttttttttttaaggatattagttatattgtattaggttttattttaatggttttattttaatttaattatttttgtaaagattttataagggggttttttaaaataaggttacgttttgaagtatttgagattaggattttaagagaatttttgaggaatataatttagtttataatagtattttgattaagtataatggtttatatttgtaattttaatattttgggaggttgaggtaggaggattgttggaggttaggagttcgagattagtttgggtaatatagtaagattttatttttataaaaaaaatttaaaataaaattaaaaataaaatataaaaaaaaatagtgttttgatttttattttttgaaattgaagtaaaggttaggcgtagaggtttatgtttgtaattttagtattttgggaggtcgaggtgtgcggattatttgaggttaggagtttaagattagtttggttaatatggtgaagtttcgtttttattaaaaaatataaaaaattatttgggtatagtggtatgtgtttgtaattttagttatttgggaagttgaagtaggaaaattattggaattcgggaggtagaggttgtagtgagttgagattatatttttgtattttagtttgggtaatagagtgagattttattttaaaaattaaaaattaagtgattaaattaaaaataaa

SEQ ID NO: 2379 - DNA, 1146 bp, Artificial Sequence
  chemically treated genomic DNA (Homo sapiens)
tcgtcggttcgtgtataaataaggttaaggaagtttaagttttttttttgtaaagagacggttttagtttttgcgttcggtatcggtttagttatttttgttggttttattttttttttacgttcgagttggggggaggttaggaaagagtgtttattttttattgtagtttttcggttttagattgttttttttttggttttaaagttattttcgagtttttttaagagatttttttatgcgatgttattattttaagttttttcggtttatttgttttgggattattttttttagtttggttgtgtcgtttggtgtattttttatattttttgtttttttattttatttttggaaggttttaaatatgttttgtatgtattaagtagggtatattattattgtgtgtcggtttaggatttagtgaatttggagttttggagtttgggcgtttttcgcggatttcgtttggatttgtttcgttttttttaggttttgggtgttgtttagatggtgaataatgcggtttggcgggacgtcgggaagaggtttggtaggcgttggcggttggaggggttgaggttttcgaggaagcgtttttgttattttacgcgggttattgtatttttgttatcggtggtttgggggttttaaggcgttttttttagaaggttgtagggtgtttcggcgtgcggggggtatttatgtattttaagttagttaggttcgggttcgaggggcgtggtagcgtagggtgggcggggttgatgagagatagcggagatagagattggacgagagagcgagtcgggttgttagcgttttattcgttttagttcggtttagttttcgcggatttttttaggtcgcgattttaggcgttttgtgtcgttacgttttttatttgtgtgggttttttgttgggttcgtttttggttatagttagattgatttagtttttttgggaggtttcgttcgagttcgttttttttttttttttgttcgtttttagttttcgttttattttcggcgttcgtatatttgtttgtttagttttagacggcgttcggattttcgggcgcgggatttagttaggtgggagtttcgtagatgaggtttttgaaggtgaggtcgttcgttggttta

SEQ ID NO: 2380 - DNA, 1146 bp, Artificial Sequence
  chemically treated genomic DNA (Homo sapiens)
taagttagcgggcgattttatttttagagattttatttgcggggtttttatttggttggatttcgcgttcgggggttcgggcgtcgtttggagttgagtaggtagatgtgcgggcgtcgagggtggggcgagggttgggggcgggtagagggaggggaaggacgggttcgagcgggattttttagggaaattgagttagtttggttgtgattaggggcgggtttagtagaggatttatatagatggagggcgtggcggtataggacgtttggggtcgcggtttggaggggttcgcgggggttaagtcgagttgggacgggtggggcgttggtagttcggttcgttttttcgtttagtttttgttttcgttgttttttattagtttcgtttattttgcgttgttacgtttttcgggttcgggtttggttgatttggagtgtatgggtgtttttcgtacgtcgggatattttatagttttttggggaaggcgttttgggatttttaggttatcggtggtagggatgtaatggttcgcgtagggtggtaggggcgttttttcgggagttttagtttttttagtcgttagcgtttgttaggttttttttcggcgtttcgttaggtcgtattatttattatttgggtagtatttaaggtttggagggggcggggtaggtttaggcggaattcgcggggggcgtttagattttagggttttaaatttattgggttttggatcggtatatagtagtagtatgttttgtttaatatatataggatatatttgaggttttttaggggtggggtgggaggatagagggtatggggggtgtattagacgatatagttagattgagaaaggtggttttagagtaggtgagtcgggagggtttggggtgatggtatcgtatgggagggttttttgaggaggttcggaggtggttttggagttagaggaggaatagtttggagtcgggaggttgtagtgggggatgggtatttttttttggtttttttttagttcgggcgtgaaggagggatggagttaataggaatggttgagtcggtgtcggacgtagggattgggatcgtttttttgtagaggggggatttgggtttttttggttttgtttgtatacgagtcgacga

SEQ ID NO: 2381 - DNA, 1829 bp, Artificial Sequence
  chemically treated genomic DNA (Homo sapiens)
tttagagggttgtagaagttttgttttgattttttttttaaatatgttttttaagtttttagaattttttttttttttaggaatattaattatttttaggtttggttatttaatataattttagattttttggaggttttgtttatatttttttatttttttttttttgtttttgttgaattgggttaatttgaagattttgtttttgagttttgatttttttttttttatttgtttaattttattgttgagattttttagagtattttatatttttaaaagtgtgtttaaagttttttgaatttttaattattttttttttaagttattttattgaatattttttttatttaatattgggggattgtgttgggagaggagggttttttttttttattttcgtaaatggggtatttatagtatttggagtgttttttgggttttgtaggagtagtttggtttttttagagagtttgtgggtttttttgggattgttggtttttttttgtagttgatttggagttaaaatttattatggaagtttttagatgttgttttgtttgaagttgtaatttagttttgttatttagttattatgattttttttatttttttgtttattttagttagataagtttaaagttagaataaaggatttatatatgagtttacggatttgtttttaaatatttgagaagttttttaatttattatgagaatattgattttaatcgggatttttgttttgttttaatagttagatatttagagaggtttttagatttagtaattaatggatttggtgggatggttgtttttaaagtagttagtatttttattaggttggcgtttggttttgtatttttttgggatatttagaattttttgatatgtatttttatttaattgtgaatttaaaaaattatagatggatgtagatatagatatagatatagatatagagatagatatagatagatattttggagaagagtttttttttgaagatttttttttagagtataagttcgtggttataattattttgttttttagtaaatatggggaagtttgttttttttttttgaggaagttaatataaatgtttattgatagtgtagttattaaggaataaagttgttgatttatttttttatattgaaattttttgttgtgtttttttttttttttttttttatagggagatattttgagaaagagtatattgtgggggtttattttatgtgatgtttgtttggttgtttgtttttttttttatttgtagagtacggtttttataagggcggcgagattagttttttgttttatttggaagattattattttggggttttagaggaatgatggaagttttggggtttttaaaattggaagtgaatggttttatggtgacggtggttttgttagtggtttttttggtttttttgaaatggtaagtgtagttagttttagggattgtgatagcgttagtcgttttattttggagttttgttggtgttatggcggggtatgtgggagtgtgtttttttttttttttaatttagcgggagtgagtattaatatagttttagaattaaaagtaaatagttaggttaattttttgttaaaatgtatgagattgaagtgttaggaaaggttggtgatttagtgattgagaacgttatatataattaagtttgaaagagatggaaaaagaaataaattggaaaggtattaggtttgggtagaagtatttttttgaatttcgttatatttttttattttatttttttaaaattttttgtttttgttggatttatagtgaattt

SEQ ID NO: 2382 - DNA, 1829 bp, Artificial Sequence
  chemically treated genomic DNA (Homo sapiens)
gaatttattgtaaatttaataaggatagaggattttagaaaaatgaggtgaggagatatgacggggtttaaggaaatgtttttatttaaatttaatgtttttttaatttgtttttttttttattttttttaaatttaattatgtgtagcgtttttagttattgaattattagttttttttgatattttaattttatgtattttagtaaaagattaatttggttgtttgtttttaattttgaagttgtgttaatatttattttcgttagattagaaaagaagaaaaatatatttttatatatttcgttatggtattagtaaggttttagggtgagacggttgacgttgttatagtttttagggttggttgtatttattattttaggagggttaagagagttattgatagggttatcgttattatggggttatttatttttaattttagaaattttaaggtttttattatttttttgagattttagagtggtggttttttagatgagataggaggttgatttcgtcgtttttatgggaatcgtgttttgtaggtagaaaagggaataggtaattaagtaaatattatatggagtgggtttttataatgtgtttttttttagagtgtttttttataaagaggaaggaagaggagggtataataaagggttttagtgtaaaggaatgaattagtaattttattttttgatgattgtattgttaataaatatttatattaatttttttagagaagaaaagtaaatttttttatgtttgttgagaaataaaatggttgtaattacggatttgtattttgagaggaagtttttaaagagagatttttttttaaaatgtttatttatatttatttttatgtttatatttatatttatatttatatttatttataattttttaaatttataattaagtgaagatatatgttaagagattttgaatattttagaaaaatataggattagacgttagtttgataaaaatgttggttgttttgaggataattattttattaagtttattagttgttgggtttgaggatttttttgagtgtttggttgttggagtaaagtaaagatttcgattggggttagtgtttttatggtgagttggagggttttttaagtgtttgaaggtagattcgtaggtttatatatgggttttttgttttagttttgagtttatttgattaaagtagatagagagatggaggggattatagtggttgggtggtaggattagattgtagttttagatagagtagtatttggaggtttttatggtgaattttagttttagattaattgtaagaaaaaattagtaattttaaaaggatttatagattttttgaaggaattagattgtttttgtaggatttagaagatattttaaatattgtgagtgttttatttgcggaagtgggaaagggagattttttttttttaatataattttttaatattgaatgggagaaatatttaatgaaatagtttaaagaaaaaataattgaaaatttaggaaattttggatatatttttagaaatgtgaaatgttttggaaagttttagtaatagaattgaataagtagaagaaagaaaattagagtttaaagataaggtttttaaattaatttaatttaataaagataaagaaaaaagaataagaaaatatgaataaagtttttaagaagtttgggattatgttaaatgattaaatttaagaataattggtgtttttgaggaagaagagaattttaaaagtttggaaaatatatttgggggaagaattaaggtaaaatttttgtagttttttaga

SEQ ID NO: 2383 - DNA, 2381 bp, Artificial Sequence
  chemically treated genomic DNA (Homo sapiens)
ttgtaggttggtttcggttttatttttaggtgtggttttaggatagttttggtcgttgttagtttgtaggttatggattttgttatgtgtttagtagttcgggtatttattagttggtttgttttacgtggcggtttttgggtagttggcgagaatagttggtacgggttttcgtgggtggtgggtcgtagttgttgtatggggatattatttatagtggggtcgatcgttatcgtttgtatatagttgttggtggtatcgtgtatttggagatcggtttgttgtttcgtaatttcgatcgttacggcgtggagtgttgagggattttgtttttaacgttattattatttatatttcggatatttagtgatgggggaggatggtatagtggttaagagtatagattttagagattgttagagttgattttagttaaggtatggtatcgtttttgttttttttaggatttcggggtttttttgggtttagtttttttatttgtaaattggggatagtaaatgtatggggtcgtagggtgttgagtgataggaggttgtttagttatatgggaggtgtttagtaaaggagagtaatttttataggtgtttgttttttgatttttttattttttaggtgttttgttgttttttttttttattgatatttttcggaggtttttatgttgatagattttttttttgttttttttttttggtgatttatatcgttcgtaaagttatagcgtatttggattattcgttttggtggcgtttggtcgttaggaggtagtattttgtttggttttttttttttggtgatttatatcgttcgtaaagttatagcgtatttggattattcgttttggtggcgtttggtcgttaggaggtagtattttgtttgcggggcggagtcggggagttcgtttttttttttttagggttgaagggatttttttcggagttcgtttacgcgagatgaggacggtggtttagtttttttatgttttttttttgggggtcgttttcgttttcgtttcgtgcgttttttgggtggggtcgggggcggttttaaaattttttgtcgatttagtcggttttcgtcgtcgtcgtttttcgcgttttgggttattttttttttattttttttcgcggagtagttagatagcgagggtttcggtcgggggtaggggggacgtttcgttcggggtattttttcggttttgagtcgttcgcggggtcggtttcggttcggagcggaggaaggagtcgtcgaggagtagtttgaggttttagagtttgagacgagtcgtcgtcgttttcgttattgcggggaggagggggaggaggagcgggaggagggacgagttggtcgggagaagaggaaaaaaatttttgagattttttcgttgtcgttgggagtcggaggcgcggggattttttggcgcgacgttgtttcgcgaggaggtaggatttggggattttagatcgtttttttttgtcgtcggggacgtttgttttttttttgttttttatacggcgttttttaggcgtttttatttcggattagttttcgggagtcgtcgattcggtttttcgtaaagatttttttttagatttcgggcgtattttttgtacgtcgtttttattttcggtttgttttttgagttttcgcgtattttagatttttttttttttaggagacggattttttttcgatttgttatagattttttatttaagattatttattttttggtattagatcgcgtttatttaggttattttcgtgggatattgagatattttcggtttaagttttttttttattattgcgtttttttttttgaggattttagttttttttcgaggtttttttattttttgtcgggagatttttagtttttgtaggggcggggtttttttattatattagttttgttcgcgttttcggtagtgtcggggggcgtcgttttttttatgtcgtttttcgggttgcggttgttgttgttgttgttatcgttgttgtggttattggtgttgacgtttggtcggtcggtcgcgggattatttatttgtaagattatcgatatggagttggtgaagcggaagcgtatcgaggttattcgcggttagattttgtttaagttgcggttcgttagtttttcgagttagggggaggtgtcgttcggttcgttgttcgaggtcgtgttcgttttgtataatagtattcgcgatcgggtggtcggggagagtgtagaatcggagttcgagtttgaggtcgattattacgttaaggaggttattcgcgtgttaatggtggaaatttataacggtgagttcggaggggtaggggagtcgggaggggggtttttagggggcgtt

SEQ ID NO: 2384 - DNA, 2381 bp, Artificial Sequence
  chemically treated genomic DNA (Homo sapiens)
ggcgttttttgggggtttttttttcggtttttttgttttttcgagtttatcgttgtgggtttttattattagtacgcgggtgatttttttggcgtagtagtcggttttaggttcgggtttcggttttgtatttttttcggttattcggtcgcgggtgttgttgtatagggcgagtacggtttcgggtagcgggtcgggcggtatttttttttggttcggggggttggcgagtcgtagtttggataggatttggtcgcggatggtttcgatgcgttttcgttttattagttttatgtcgatagttttgtaggtggatagtttcgcggtcggtcggttaggcgttagtattagtagttatagtagcggtagtagtagtagtagtagtcgtagttcggagggcggtatgggggaggcggcgtttttcggtattgtcgagagcgcgaatagggttggtgtggtggggaggtttcgtttttgtaggggttgggggtttttcggtaaaaggtaggagggtttcgagggaaagttgaggtttttagggagaagggcgtagtggtggaggggaggtttggatcgggggtgttttagtattttacggaaataatttagatgggcgcgatttggtattagaaggtgggtggttttgaataggggatttgtggtaggtcggagagagattcgttttttggaggagaaagggtttaggatgcgcgggggtttaggagataggtcggggatgaaggcggcgtgtagggggtgcgttcgaggtttggggaaaagtttttgcgggaggtcgggtcggcgattttcgagggttggttcggaatgggggcgtttgagggacgtcgtgtagggggtagggagggagtaagcgttttcggcggtaaagggaggcggtttggggtttttaagttttgttttttcgcggggtagcgtcgcgttaagaggttttcgcgttttcggtttttagcggtaacggaaaagttttaaaagtttttttttttttttttcgattagttcgttttttttttcgttttttttttttttttttttcgtagtggcgggggcggcggcggttcgttttagattttggggttttaggttgtttttcggcgattttttttttcgtttcgggtcgaggtcggtttcgcgggcggtttagagtcgggggggtgtttcggacggggcgttttttttgttttcggtcggggttttcgttgtttggttgtttcgcggagggaggtgggagggagatggtttagggcgcgaagggcggcggcggcggggatcggttgggtcggtagggggttttgaagtcgttttcggttttatttaggaagcgtacggggcgggagcgggggcggtttttagggggagggtatgggggggttgggttatcgtttttatttcgcgtgggcgggtttcgaggggggtttttttagttttgggggaaagggggcgggtttttcggtttcgtttcgtaaatagggtgttgttttttggcggttaagcgttattaaagcgggtgatttagatgcgttgtggttttgcgggcggtgtgggttattagagaaagaggattaaatagggtgttgttttttggcggttaagcgttattaaagcgggtgatttagatgcgttgtggttttgcgggcggtgtgggttattagagaaagaggatagaaggagggtttgttaatatgggggttttcggagggtgttagtgggaggagggggtaataggatatttgagggatggaagggttaggaggtagatatttgtaagaattgtttttttttattgagtattttttatgtggttaagtagttttttgttatttaatattttgcgattttatatatttattgtttttaatttatagatagggaaattgggtttagagggatttcgaggttttagaaaggatagaagcggtgttatgttttagttggggttagttttgatagtttttagagtttgtgtttttgattattgtgttatttttttttattattgggtgttcggggtgtggatggtggtgacgttggaggtagagttttttagtattttacgtcgtagcggtcgaagttgcggagtagtaggtcgatttttaggtgtacggtgttattagtagttgtgtgtaggcgatagcggtcggttttattgtagatggtgtttttatgtagtagttgcggtttattatttacgaaagttcgtgttaattgttttcgttaattgtttaggggtcgttacgtggggtaggttagttggtgggtgttcgggttattgggtatatggtaaaatttatagtttgtaagttggtagcggttaaagttgttttgggattatatttggaaatggagtcggggttagtttgtag

SEQ ID NO: 2385 - DNA, 7445 bp, Artificial Sequence
  chemically treated genomic DNA (Homo sapiens)
gaattttgggtttttttttagggaaggattttggtttcgaggatttaagggtcgataaggcgaggttagagttaggatttttgattttttttttgtagaatgagtgtgataataaatttattttagggtggtggttaggataatagtgttttgttgagttatagttattaaagttttgttattttaagcgtgattttggagtaggggagtttgtttaaaatttattattagattttttaattttatatttattgagtcggaatttgtttttgggttaggtttagtgttttgtgtgcgtattttaggtggagaagtcgtgtaggggaagtttgtttgtttgtttttttgataattttaataagttttaagtagcgtttattcggtaagtatttttagattattttggggtgtttagaaagtaggtttaggttagagagaagagtaaggggaggtgatataaaaatttttgagttagaagggttgtgacgagtgtgtttggttttggtttttagttcgtgtttttttttttagtttaggtttttgtatatttaatgtgtttagttgttttttaatttttttgcgttattgtgaaaggaatagagttatattaggatttgttgtttttgacgtagtttatgtataatttgataacggaaattacggtttagggataggagtttttggggtagaagggagtttttttttttattatatttgtggtttagttttagttagaggtttatgttttaaggttttgtttgtttttttttgtttttttttttttagtggttttatttgttttttgtttatggatttaaatattatttttaatgaaggattgtttaggttttagatttatttattcggtttttattgaaatatgtttatcggatataatatattttattgataagaaagtagaatagttttattgttgattgatagggagaaagtttgagtgttttggagagaaaattaaattagttataatattttttgaggttaaagtttaatttaagtaaagttttaattttttttaattttgtgaagtttgagagagatgaggaagttgtagaagaaaagttcgaagttggtagagattggtttatgaagtttagggaagaagttatttttgtaagataaaaatgtaaggtgaagtagtaagtgttgatggagaagttgtagtaagtgatttaaaagatttaattaaaattattgcggaggtggttatatttaatagttgatttttaatgaagacgaaatagttttgtattagaagaggttatttttaattgttatagttatagaggagaagttaatgtttggttttaaaaatttaaaggttaggttgttttttttattagaggttaatgtagtcggtgattttaagttgaagtttgtgtttatttattaatttgaaaatttttagtttttaagagttatgttaaaggtattatttttatgttttttaaatggaataataaagtttagatgatagtaaatttgtttttagtatggttgattaaatattttaaatttattgttgagatttattgtttaaaaaatgatttattttagaatattattgtttttggttaatgtatttagttatttaagaattttgatggaaatgtttaatgagatgatgttgtttttatgtttattaattaatataatatttattttgtagtttattagttaaggagttatttggatttttaagttttattatttaagaaatatattttatgaggttatagttgttatagagagtgatttttttgatgaatatgagtaaagttaattgaaaattttttggaaaggatttattattttagatgttattagtatatttatgatttacgggaaaaggaaaaatataaatattgataggagtttggaagaagttgatttttttaaattttattatgagggatgattttgagggtttaaggttttagtagaggaagttattgaagatgtgatggaatgagtgagagaggtagagttagaagttgggtttgaggatgggattgaattgttgtatttttatgataaaatttgaatggattaggagttattttttaaggatgagtaaagaaaatgatttttttagatgaaatgtatttttagtgaagatgttgtgaaatgttttatttttggggaagatgttgagatgataataaataatttagattattatataagttaagttgaaaaaatagtagtagtattttagagaatggatattaattttgaaataagttattgtgtgagtaaattgttattaaaaattatgatatgttatagagaaacgttttataaaagagtttatagatgtagtaaattttattgtggttttattttaagaatttgttatagatattttaattattagtaattattattttgattagttagtagttattagtattgaggtaagattttttattagcgaaaagatgacggtttattgaaggtttaaatgacggttagtagttttgagtaatgaaatgttttagaattaagatatgtatattgtttttttagatataatgttattgtatttttaatagataatagtggagtgtaaatattttttttatatgtattgggaaagtataaatttatgtaatttattttattgtagagttgtggaatcgagtttgcggtatttttaaggtgtgtttgtattagttttttgggttcgttatgatgaagtattataaataatatatatgtattgttttatggttttggagtttagtagttttaaatgtagtgtgtggtagggttgtacgttttcggaatgttttggtagaggttttttttttgttttttatagttttggtgtttttggtagtttttggtgattttggttagtggttgtattattgtggtttttgttttttttattaagcggagttcgttttgtgttttcgtttttatattttttatttttattagaatattagttattagatttggagtttgttttatattagttcgacgatatttatatttgattttatttataagtattgtggtatttttagtaagtttatttataggtttggggtggacgtgaatttggggggatatgattttatttgttgcgtgtttgttttttattttttcgcgtatatatgtgatgatgttttttttagtatcgttggtttttttgacgaagtttttgattgttttttgttttatttttatatttttttttttttttatttttagggggtttagggaagatgttgattaggggttgttttttttattttttttttggttttttgtatagtgggtttatgaagtttcgttttattttgttaggaaattttttgtgatttttatcgtttacgaagtttattttatgtatttggtttgggtgtcgtattaggagtttgttgttttttgtattatgaatatttatttattttttttgtttgaaatatttttttaatcggggatattttatttacgggttacgttttaatcggtttattttttgttttttttaaatagatttgtttgattttgggttgttagattttatagaaggaggtttattttttttgtatttgtttatcggtacgtggagttatgaatatatatttttttgttttttagtgagtgttacggtttttatcgtatgtttttgaagtgttgagtagttgagttgtttgtttttagttttaattaggaaatacgtattttgtggattgaggaataggagaggtcgtggtacgtagagtaggggatgtcgttttttatgttttggttttaggaaaaattaatttggaggtagaaaaatttaaattgatgaatggataattatttattgaaaattttttaaggggaattggtttatattttttttgaatttgagataatattaatttatttaaattattttttaatttaaatgatgattttgtttttaatagtttaaaaagtaaaataacgtattttaaatatgatatatatatttttggaggtttttgtttgtgtatgtgtcggaaattgatgtttgttaagtgataaataaataggtgttattaggaaaaatagaggtttttataaatgaaagtttttttttttttttatattcgttcgtatattttttttgaagatagaggttagaaagtgaggtttgttttttatggtgtttgtcgatttttgtagcgttggatttttgtgggggaatgttaggaggtttaagagatatttttttgttatagatatagtaagggttgtgtttatagaaattcgttttaatgttttttaattaggatttgacggatttatggttaggttgataattttatataaacgtgaaggaatttgataggtaggtgtcgatatgaagtaggtgtaggtggtttcgggtaaagtagtagttttttagttattatttattttatttggggaagtagtattttttttatttaaggtttattttaatttaggagaagtagtagtttttttgtttgttattaattttgatttgggagaaataatatatttttagttattttgtatattgatttgggagaaatagtttttttattatttattttttatattggtttgggagaagtggtattttttttatttattgtttagtttaatttgggagaagtagttttttttttatgtattattaatttttattttagagtagtagttttttttttttattgtatattttgatttgggagaagtagttttttcgtatttatcgtttattttgatttttgagaagcggtgttttttatttttatgtagagtgtattttgattgcgggtgatgtttgaggtgtgggaggggcgggggttagttgttgttattgtttttcgttttttcgagtttttgttttgtgtttgtacgttaggttgtttttgtgatggggttacgtgtaagtgtgtattaaggggatttggtcgggtattgtacgtttattgggatatatttttttacgggtattgtacgtttattgggagacgtttttttaggggatttttattgagtaaatgaagtagaatttgggtaaaaatgaatttttttaaagttgtagtatagttttttagttttttaattgtttgagataaatgttggtaatttttttttatattaaattttatttttgttatataatatatttgattattgattataataattttattaatatatagattgattattgatatttatcgatgtattttatgtgttattgagagttatttatttggtttagaaagattaatattatattgagtaattcgaaatatatttaaggtatagaatttgtattttttttttttaagtaaaatgaggagttttagttaattttgttagtgttatttatagtattttattttttgagagaagataggaaaagtgagtttttgtttttttttttttcgtttggttttttttaggtttgtttggtaggggtcggggtgtaggaggaggagacggtatttagtatagaggggttggatttggatttttgtagtaggtattcggagtaaatggtgagattagaagggggatgatgttattttttcgaaggaatgaattaaacgtgttttttcgtgtgtttgattgatagttttgtataggagaagcggtatataaagtcgcgttgttcgggagtcgttcggttacgtttatcggagtattttgtattgtagggtcggtttttcgttttagtagagtttgcgtttttttgattcggttcggaatattgaaattagttattattgtatttttttggtaaattaggtacgattattttttaaatttaattaattatttaatggtgttttaattttaagaaattagagttttcgaattttaagaagcggagaagaaaaaggagtaatttcgatttttaatttaaggtgggtggtgtatttattaatattaaatggtaagtgtttttttacgtggtgtttttattgttcgtttgaagagtaaggtacgtggtcgttttttagtttttttttcgtggttgtgtttttattagtcgggtatttttttttttttgagggttgtggttgttgttattttaatgtatatatttgtttgggaattcgggtaaacgttttatgtttttagttttcgaagaagaagattttatatgagagtttgttattgaggagagaattagaaataattttcggaatatttgaaaagtaattggagattagagagagattttgattgttaatattattattagtagattagagagagattttgatcgttaatattattagtagattaaagagagattttgattgttaatattattagtagattaaagagagattttgattgttaatattattagtagttgaaaagtggttttgaatataattagagagtatttgtggtaagtttatggaaaattttgtgattgtcgggatatatagcgatttttaatagttttggggtagtttgtatatgaaaagcgagttggtaggttgtttggttattatttaaggaaggtgggtttggttgtttaggattgggagttgagtatttaggagtttggtgtttaattagattgttgttggtggtggacggtcggtaaataattagttttttgtaaagttattttttattttgattgtttatacgaaaagagttttaaaagatttttgtaaatttaaattatattttgttgtagataggtatcgaaattttttttttggaaaaatataagtataaacgtggatgtgtggcgtgtagaggttggggtaggggtgagcggtattggtttattcgtggttttatttatgtatgttcggtgtttttggatgggttgaggttaggtagtttggttgtttattttttttgtgggatggagttttattgttttttgataattcgtagtaggggatgttttgttagttttttgtttttgtaagaatttattttaaggtagagatagtaggatttggtttcgttaaaggagtttgatttagtttttttaatttgtttttatgaagttgggtatttagaattttcgtatttattattttgtttttggttggtttttgtagggttagttttatatagttgtttttaggggattgcgacgtattcggtagtgtgggttgatgaggtggggaggtgggaagagtttgttaaggttgtatttgagttgtgtattttaatatcgttttgtggtgtttattgtatgtaggtattgttttaagtttatggttaagtgttcgtttttgttattaaatttttttaagagttttatagaaaggttttattagtattattattattattgtagttgtttcgggtagttagagtagaaagcgttttagatttagaggtatattttgtttcggtaatttatgtttgtggttcgttgggttaagttagtttttggtgaagttttatttgtcgaattt

SEQ ID NO: 2386 - DNA, 7445 bp, Artificial Sequence
  chemically treated genomic DNA (Homo sapiens)
gaattcggtaaatgaaattttattaggggttgatttagtttagcgagttataggtatgggttatcggagtagaatgtgtttttgggtttggggcgttttttattttaattgttcgaggtagttgtagtaataatggtggtgttgatagggtttttttatggagtttttaagagggtttaatgataggagcgaatatttggttatgagtttagaatagtatttgtatgtagtaagtattatagaacggtgttagaatatatagtttaggtatagttttggtaggttttttttatttttttattttattagtttatattgtcgggtacgtcgtagttttttaaggatagttgtgtggggttggttttgtagaggttagttaagaataggatggtaaatgcgaaagttttggatgtttagttttataaggataggttagaaaaattaaattaaatttttttgacgaaattagattttattgtttttgttttgaggtagatttttataagagtaggaggttaataaagtattttttgttgcggattgttaaaggatagtgaggttttattttataggaaggatgagtagttaggttatttggttttagtttatttagggatatcgggtatgtatggatggagttacggatgagttagtgtcgtttatttttgttttagtttttgtacgttatatatttacgtttatgtttgtgtttttttaaaagaaagatttcggtgtttgtttgtagtagaatgtagtttgaatttgtaaaggttttttaaaatttttttcgtatgaataattaaagtaaaagatagttttgtagagagttaattgtttatcggtcgtttattattaatagtagtttgattaaatattagatttttgggtgtttagtttttagttttgggtagttaaatttattttttttaagtggtagttaggtaatttgttagttcgttttttatatgtaaattgttttaagattgttaaaagtcgttgtgtgtttcggtagttataggattttttatagatttattataaatattttttagttatgtttaaaattattttttagttgttaataatgttaataattagagtttttttttaatttattaataatgttaataattagagtttttttttaatttattaataatgttaacgattagagtttttttttaatttattaataatgatgttaataattagagtttttttttaatttttagttattttttagatatttcgggagttgtttttaattttttttttaataataaatttttatgtggaattttttttttcggaaattgaaaatataaagcgtttattcgggtttttaggtaggtatatatattgaaatagtagtagttataatttttagagaggaaggggtgttcggttggtgaaagtatagttacggaggaaaagttgaggagcggttacgtgttttgttttttaagcgggtagtagaaatattacgtgaagaaatatttgttatttagtgttaatagatatattatttattttaagttaagaatcgaaattgtttttttttttttttcgttttttagagttcgagaattttaattttttaaaattagagtattattaaataattgattgagtttaagaaataatcgtatttggtttgttaaaaagatgtagtgatgattggttttagtgtttcggatcgagttagaaaggcgtaggttttgttggagcgagagatcggttttgtagtgtaggatgtttcggtggacgtggtcgagcggttttcgggtagcgcggttttatatgtcgttttttttgtgtagggttgttaattagatatacgaggaagtacgtttaatttattttttcgaaggaatgatattattttttttttgattttattatttgtttcgagtatttgttgtaggggtttaagtttagtttttttgtattggatgtcgttttttttttttgtatttcggtttttgttagataggtttgggaggagttagacggagagagggaaggtagggatttattttttttgtttttttttaggaaataagatgttataaataatattagtaagattggttagaattttttattttgtttaagagaaaaaaatgtaagttttatgttttaaatatgtttcgaattatttaatgtgatattggtttttttaaattaaatgagtgatttttaataatatatgaaatatatcggtgagtattaataattagtttgtatattaataaagttattatggttaataattaagtgtattatgtgataaaaatgaaatttaatataaaaggaagttgttaatatttattttaggtagttagaggattgaaaagttgtattgtagttttgggaaaatttatttttatttaaattttgttttatttgtttagtgaggattttttagaaggacgttttttagtggacgtgtaatattcgtagaagggtgtgttttagtggacgtatagtattcggttaagtttttttggtgtatatttgtacgtggttttattataggaataatttgacgtgtaggtatagagtaaggattcgagagaacgagaagtagtggtagtagttaattttcgttttttttatattttaggtattattcgtaattagggtgtattttgtatgggggtggggggtatcgttttttagaggttagggtggacgatggatgcggaggggttgttttttttaggttagggtatatagtggaaaggggaagttgttgttttaaggtgggggttgatggtatatgggggaggggttgttttttttaagttgggttggatagtggatgggggaggtgttattttttttaggttagtgtgaaaggtggatggtggagaggttgttttttttaggttagtgtgtaaggtggttggggatgtgttgttttttttaggttagggttaatggtagataggggagttgttgttttttttgggttggggtggattttggatgggggaggtgttatttttttaggtggggtggatggtgattggggagttgttgttttgttcggagttatttgtatttgttttatgtcggtatttgtttgttaggtttttttacgtttgtgtggagttgttagtttggttatggattcgttaagttttagttagagaatattaaagcgaatttttgtggatataatttttattgtgtttgtggtaggggagtgttttttaagttttttggtatttttttataggggtttagcgttgtagaggtcggtaggtattatgaagagtaagttttattttttggtttttgtttttagggaggatatgcgagcgggtgtgggagagggaaggagtttttatttgtgaaaatttttgttttttttaatggtatttgtttatttattatttggtaaatattagttttcgatatatgtatagataaaagtttttaagagtgtatgtgttatgtttaaggtacgttattttgttttttaagttattagggataaagttattatttgaattaaaaagtagtttaaatagattgatgttattttaaatttaaaaaaagtataaattagttttttttaaagaatttttagtggataattatttatttattagtttgagtttttttgtttttaggttagttttttttggggttagaatatggagggcggtattttttattttgcgtgttacggttttttttgttttttagtttatagaatgcgtgttttttgattaaagttgaagataggtagtttagttgtttagtattttaggagtatgcggtgaagatcgtgatatttattggggagtaggaaggtatgtatttatgattttacgtgtcgatgggtaggtatagagaagatgggtttttttttgtaaaatttggtagtttagaattaggtaagtttgtttagaggagatagaaggtaagtcgattggaacgtggttcgtgaatggggtgttttcggttgagaaagtattttaggtagagagagtgggtaggtgtttatggtgtaaagaatagtaggtttttggtgcggtatttaggttaggtgtatggaatgggtttcgtagacgatggaagttatagagaattttttggtagggtgaggcgggattttatgggtttattgtgtaggggattagagggggagtagaggggatagtttttggttagtattttttttgggttttttgggggtgaggaggaagggagatgtgaggatgaaataaaaagtagttagaggtttcgttaggaaagttagcgatgttgagggaagtattattatatgtgtgcgcgggaggatgagggatagatacgtagtaggtggaattatgtttttttaagtttacgtttattttaaatttgtgaatgagtttattggaaatattatagtgtttgtggatgaaattaagtgtagatgtcgtcgaattgatgtaggataggttttaaatttaatggttagtgttttaataagaataaagaatatgaagacggagatatagggcgagtttcgtttgatgaaagaggtagagattatagtgatgtaattattagttaaggttattaagggttgttagaaatattagaattgtgggagatagggaaggggtttttgttagaatatttcgaggacgtgtagttttgttatatattgtatttaaaattgttggattttagaattatgggataatatatgtgtgttgtttgtgatattttattatagcgggtttagggaattaatataggtatattttggagatatcgtaggttcggttttataattttgtaataaagtgagttgtatggatttgtgtttttttagtgtatataaaagggatgtttatattttattattgtttattaagggtgtaatagtattatgtttaagagaataatgtgtatattttaattttaaaatattttattgtttaaaattattaatcgttatttgagtttttaatgagtcgttattttttcgttggtggagagttttgttttaatgttggtggttgttgattgattagggtggtggttgttgatggttggagtgtttgtagtaggtttttagagtaagattataatgaagtttgttgtatttatggatttttttataaaacgtttttttgtagtatattatggtttttgatagtagtttatttatataataatttgttttaaaattgatgtttattttttgaaatgttgttgttgtttttttaatttagtttatgtaatagtttaaattatttgttgttattttaatattttttttaggagtgaagtattttataatatttttattgggagtatattttatttgaaaaaattattttttttgtttatttttaagaaataatttttgatttatttaagttttattatgagagtatagtaatttagttttatttttaggtttagtttttaattttattttttttatttattttattatatttttagtgattttttttattgaagttttgaatttttagggttattttttatggtggggtttggaagaattagttttttttaaatttttgttagtgtttatatttttttttttttcgtgaattatgaatgtattagtggtatttagaatggtgaattttttttagaaggtttttagttgattttgtttatatttattagaggaattattttttatggtagttatagttttatgaaatgtattttttaaatagtaagatttgaaagtttaaatgattttttgattgatgggttgtagagtggatgttgtgttagttagtaagtatgaaagtaatattattttattgagtatttttattagagtttttgggtgattaggtgtattgattaagagtagtaatattttaaaatagattattttttgagtagtaggttttaatagtgggtttgaaatatttagttagttatgttgagaatagatttgttgttatttagattttgttgttttatttaaagagtataagaataatatttttagtatagtttttaagggttaaagatttttagattggtaaataagtataggttttaatttgaagttatcggttgtattagtttttaataaaagagatagtttggtttttgaatttttgaagttaggtattgattttttttttgtagttatgatagttggagatggttttttttaatgtaaggttgtttcgtttttattgaaaattagttgttgagtgtagttattttcgtaatgattttagttagattttttgggttatttgttgtagtttttttattagtatttgttgttttattttgtatttttgttttatagagatggttttttttttaaattttatgaattaatttttgttagtttcgaattttttttttgtagtttttttattttttttagattttatagaattgaagagagttagagttttgtttagattaggttttggttttagagaatgttgtggttggtttgattttttttttaggatatttaaattttttttttattaattagtaataaggttgttttgtttttttattaatggagtgtattatattcgatgggtatattttagtggaagtcggatggatgagtttaaagtttgggtaattttttattagagatgatgtttaaatttatgggtaggagataggtgaggttattggaaagaggaaggtaggaaggggtagatagagttttagggtatggatttttggttggagttgaattataggtgtggtgagggagagggtttttttttgttttagaaatttttgtttttgaatcgtggttttcgttgttaggttgtgtatggattgcgttagaaatagtaaattttggtgtggttttgttttttttatagtgacgtaggggggttgaaaagtaattggatatattgaatgtgtagaggtttgagttgaagaaaagagtacgggttggggattagggttaggtatattcgttatagtttttttgatttagaggtttttatattatttttttttgtttttttttttggtttgaatttgttttttaagtattttaaggtgatttggggatatttgtcggatgggcgttgtttggagtttgttaaaattattaaaagaataagtagatagattttttttgtacggtttttttatttggaatgcgtatataggatattgggtttggtttaaaggtagatttcgatttagtaggtgtggggttggggaatttgatggtgggttttgaataagtttttttgttttaagattacgtttggagtagtaagattttagtgattgtaatttagtagggtattgttattttggttattattttggggtgggtttgttgttatatttattttatagaggagaaattaaaggttttggttttggtttcgttttgtcgatttttgggttttcgggattaggatttttttttggagaggggtttagaattt

SEQ ID NO: 2387 - DNA, 1996 bp, Artificial Sequence
  chemically treated genomic DNA (Homo sapiens)
ggatttatatcgttataattttattatattgcgtgttatacgaatagatgtgaatattaaattatgatgtcggaattattttaatattgtttataagaaattaattgtattttgttgttaaagtagttttgttgtaattatagttttttattgattattttttagttgagtgaggattcggtattttttaagtatttttttagtttagaaagtaagtttttttttggtttttaggatttaaggtcgggggtatttgagagatttatatttgttcgggaaagattttttgaagagtatatattatttttgtttttttggttttatttatatatttttagggtaaagataaattaatagggcggtcgttttgggatttgaggagtgttttagttttgtacgcgttttttttacgatatgtataatggcggtgggggcgggggtgttttttttaagggtaatttaggtacgttttaaatttttattcgtggggtggtcgtggtggttaagagagttgttagatggtcggattagcggaggttttaagaagagttagagcgttttgtattttcgatacgcgttataagtggtttaggagcggagggaggagcgttgcgtacgggtcggttcggcgggtaaagaaggcgagacgtgtttttggaagattcgtttttcgtttcgtgttattcgttttttattttttttttttttttaattagagtaatgacgtttaaattcgtatttatgcgcgtaggtaatcgggtgggtggacgcgcggttattaaatttatagtatcgttattaattttgggagggtacggtcgggattaggaggagggggagcgtttatatttggggaggtaggtgcggaggcggtcgtttcggggatttcgagtgcgtaggattcggggtcggggtcggggtcggtaagtcggcgttgtgagcgcgtcggagcgttggttcggagtatggtagggggcgtttgtatcggttgggtagttcggggcggtggcgatggcggtggcggcggcggcggggtgtgcggttaggaggtattttttcgttgcgtttttgggtagcgggtttgtttgtttttggtcgtcgtcgttatcgtcgcgtaaagtcggatagtcgtgaggttggagggaaattaggttatcggttgttaagagtcggcgcggagtaaggcgttcgggttcggagtaagatagcgttcgggaagcgggtcggggcgggtcgggtacgcgggggattcggagaggcggggattttggtgttttagtcgtagtagttttttacgtttataaaagtggagagatcggggaggtgcggtcggttttggttgcggtcgttttttttcgtttaaggagttgatattttgtaggattcgcgcgacgtttagtcgtcggcgtttttcgggatttcgtcgtcggaggagggggcggaggagggtggagattgcggggtttggttaaggaaggcgtatattttcgggcgggcggcgtgatcggcggggattaattttgtatgaataatgtgagtgcgtttggaaaagagattttttgtttcgcgggttcggggtaagagttcgtaggttatttttttcgggtaggggcgtttaatttaatcggttttagggtattggtaatttggttagaggatcgcgcggaggtagcggggtaagaggaggagggggcgatagttttaattgtttatagggtgggcgggatggtgacggagcgtcgtaagaatcggaggggtgcgggcggttaagtcgagcgcgcgcgggcgggtaggcgggtgagcgtgggtggtgggggtgttattagtttgattatttgttttcggcgtttttgcgtttcggatttgggaggatcgttttcgtgttcgggcgatcgcggcggtaggttgggagttacggagtggatagtggtggaatagggtggtcgggttttcgttttaatgtagcggttttgttttttaaattttaagttagttg

SEQ ID NO: 2388 - DNA, 1996 bp, Artificial Sequence
  chemically treated genomic DNA (Homo sapiens)
tagttggtttggggtttgaggaatagagtcgttgtattggaacgagagttcggttattttgttttattattgtttatttcgtagtttttagtttgtcgtcgcggtcgttcgaatacgagagcggtttttttagattcggggcgtagaagcgtcggaggtaggtaattaggttgatgatatttttattatttacgtttattcgtttgttcgttcgcgcgcgttcggtttagtcgttcgtattttttcggtttttgcgacgtttcgttattatttcgtttattttgtggatagttggaattgtcgtttttttttttttttatttcgttgttttcgcgcggttttttagttaaattattagtgttttggagtcggttgggttgagcgtttttgttcggggaaggtagtttgcgggtttttgtttcgagttcgcggagtaggaggttttttttttaagcgtatttatattatttatgtaaagttaattttcgtcggttacgtcgttcgttcgaggatgtgcgttttttttggttaagtttcgtagtttttattttttttcgttttttttttcggcggcggggtttcggggagcgtcggcgattgggcgtcgcgcgagttttgtaaaatgttaattttttgggcgaagagaggcggtcgtagttagggtcggtcgtattttttcggtttttttatttttataggcgtaggaagttattgcggttggggtattagagttttcgttttttcgggtttttcgcgtgttcggttcgtttcggttcgtttttcgggcgttgttttatttcgggttcgggcgttttgtttcgcgtcggtttttggtaatcggtgatttggtttttttttagttttacggttgttcgattttgcgcggcggtggcggcggcggttaagagtaggtaaattcgttgtttaggggcgtagcgaggaaatgttttttggtcgtatatttcgtcgtcgtcgttatcgttatcgttatcgtttcgggttgtttagtcggtatagacgttttttgttatgtttcgggttagcgtttcgacgcgtttatagcgtcggtttgtcgatttcgatttcgatttcgagttttacgtattcgaggttttcggggcggtcgttttcgtatttgtttttttaggtgtgggcgttttttttttttttaatttcggtcgtgtttttttagggttggtgacggtgttgtgggtttggtggtcgcgcgtttatttattcgattgtttgcgcgtataggtgcgggtttgggcgttattattttagttggagaagaggaaagaatggggaacgagtgatacgggacggagggcgagttttttaggagtacgtttcgttttttttgttcgtcgagtcgattcgtgcgtagcgttttttttttcgtttttaaattatttgtggcgcgtgtcgggaatatagggcgttttggttttttttggggttttcgttggttcgattatttggtagtttttttaattattacggttattttacgaatggaagtttgggacgtgtttgggttgtttttaaggaggatattttcgtttttatcgttattatgtatatcgtgggagaggcgcgtatagggttgagatattttttaggttttagaacggtcgttttattaatttgtttttgttttggaaatgtatagataaaattaggaagataaaaataatgtatattttttaagagatttttttcgggtaaatataggttttttaaatgttttcgattttaagttttggagattaggaagagatttgttttttgagttagaaggatatttgggaaatatcgagtttttatttagttaaaaggtagttaataaggaattatagttgtaataaaattattttgataatagagtataattaattttttatagatagtattaaaataatttcgatattataatttaatatttatatttattcgtgtaatacgtagtataatagagttatgacgatatggattt

SEQ ID NO: 2389 - DNA, 2866 bp, Artificial Sequence
  chemically treated genomic DNA (Homo sapiens)
tgtagggttcgggggtgtgggtagatggtatttttaggaattacgtttacgagatatacggtttggaattttttggagaagtaaataaattgttttttgatatttgaggttggaggttggattttcgtttttggggttttttgggtcggtttgttacgaggttttggtgtttattaaaagtgtgtttttgggttgttagaaaggtttttttttgtgtgtttttttgagggttgtggggttaaggggaatttggttgttttagtttttcgtagagtacgaatttttggttttcgtaagttcgcgggttgaggatgatttagatagggttggggagtgaaggtaattagattttacggacgagtttttttttttgcgtttttttttttttttatttattttcgtttttattaggtatagtaggtaggggtgggggatgtaaggaggggaaggtgggggatttagagggggttttgacgttagtttagtttataagaggttgttgggttagggttgtggagacggagttcggatttttatattgagttatgtttattttcgacgttattacgttataggttaagggttttcgtagggtcgtgtttgagttggacgttaagtaggtagaggttattatggtaagagggtaggtaggtgttcggcggtcgtagtggatcggagtttagggttggtgttagttgtttttgttattttttagttttggttggtagttttaggtttagggtttatgtaaatttttgggacgttagcgtggatgtggaggtttgggtatagcggtattttttgtgtttggtgtttgagtttttgttgggggagggtgaggtgatgtttgtttttgtgtgtgttttttttaggtcgatttttttcgggggtcgtgtgggtttttgtgttttgttttattttgaattttaacgatcggaatgtggaaataaatttattcgaaaaaatttaagatggttagaggttttcggttgttgtatttagtttttattttatttttatttgtttttgtttttttttgttttagttgttttagttagtattttaattagtttgtttgtttggggaggtagttttaaggttttttttaggttttagtagtagtttatggtggggggttttgggtaaatagggggtaaaatttaaagggtatttgggttttggggtgatttttattggtttgttttttttttattttttttatttatttatttatttatttatttattatggagtttgtgttttttgtgatttgtattcggaagttttgtgtataggggattgtgtgggttaggttggatgatcgggagttttttagtttataggagggggttttcggtgtttttttgggtatttagaattttgggttttttggtatttttaaaatgggtttttatttatggattttgattgaaatgtggtgtgagttgtagtagtgttattttaggtatttttttagggatatagggcgttttttttcgttttttttcgtttttttttatttttttttattaggttttttattaggtattttttttttagggcgtttcggggtttagttttataggtttttcgtggtttggaattgtagttttagttgtattttatatttttattttaagtttaagtaagaggggattttgggaggggtttttgttgtttttttttatgttttataattttggaagtttaggatgaagttgattttttttttataggggtttagagtttttttgggagtttagttttaagggatgaggtttaggtgtttgttaagttttttttttttaggtttgggacggttttgggaaacgaggggttagaggcgttgagtttagggagagatatttgcgtttagagttatgataagggtggagggattgataaggtagttaggagcgcgcgtttgcggggtggtatagagggtagggttcgaggataggtgttttgatgggagtgtgagaaagggttttttgtgcggtagttaggagcgtaggggggttgtttattggggttttgtggggtagtttttttttgagttgtcgtttttttttcggtagtcgatgttattgtttattaagatatcgttttttttttattattaatttagttagcgtttggtttggggatgagtgatatagcgtttttgtttgtttgttcgttaagagtgggggagtaggcgagtatttttttagtttttattttttttttattattattgtttttgattgggttgttttatcgggaagggcgtgtaatgttcgtaggtatttcggttagtatttgttttagtaggtatatagtaggcgtttaaaaacgtgtttttattttttgtttttgtgtgttattagcgttgttcgattgtgggattagttgtgggtggaggttttcgggttttagtaggtggaggaggtatgggtgttttttgtttttatagttttcgcggtttattgggcgtaggtagagttttatcgaggacgttcgtaaggagcgggaggcggcggtggtagtagcggtcgttgtagttttttcggagttcggggattttttggaggttgtggtttttgaggagaaggaggggaaggtcgtgttaaatttgttttttttttcgagggttattaagttttcggcgttgtttcgagttgtgaaggtgtttgaggtgagttggtggttttcgtgtttttggggtaagtttatttgtgggtggggttgtgtgggttgagtttttgatttttttatagtagaggtgtagttgtttaggttttcgaggtcggtataggatgtagtaggggagttttaggttttagtttagtttttatggtatttagttatatttttttttttttga

SEQ ID NO: 2390 - DNA, 2866 bp, Artificial Sequence
  chemically treated genomic DNA (Homo sapiens)
ttaaaaaaaagggggtgtggttagatgttatgggggttgagttgaggtttgagatttttttgttgtattttgtgtcggtttcgggggtttgggtagttgtatttttgttatagaggggttaggaatttagtttatatagttttatttataggtgaatttgttttagggatacgaaggttattagtttattttaaatatttttatagttcgggatagcgtcgagggtttggtggttttcggggagaagagtaggtttagtacggtttttttttttttttttttaaaggttatagtttttagggggttttcgggtttcgaggggattgtagcggtcgttgttgttatcgtcgtttttcgttttttgcgggcgttttcgatgaggttttgtttgcgtttaatgaatcgcggggattgtggggataaggggtatttatgttttttttatttgttgagattcggggatttttatttatagttggttttatagtcgggtagcgttgatggtatatagaggtaggggatgagagtacgtttttgagcgtttattgtgtgtttgttggggtagatgttagtcgaggtgtttgcgggtattgtacgtttttttcgatggggtagtttagttagaagtagtggtggtgggggaggagtgggggttgggaaggtgttcgtttgtttttttatttttggcgagtagatagatagagacgttgtgttatttatttttaggttaggcgttaattggattagtgatgggaagagggcgatgttttgatggatagtggtatcggttgtcggggagggaacggtagtttaggaaggagttgttttatagggttttagtgaataatttttttacgtttttggttgtcgtataggggatttttttttatatttttattaggatatttgttttcgggttttgttttttgtgttatttcgtaggcgcgcgtttttggttgttttgttaatttttttatttttgttatagttttgggcgtaggtgtttttttttgggtttagcgtttttgatttttcgttttttagagtcgttttaggtttggagagagggggtttggtagatatttgggttttattttttggagttgaatttttaagaaggttttgggtttttgtaagagaagaattagttttattttgagtttttagggttgtggaatatgaaggggagtagtagaagttttttttagggtttttttttatttaggtttggggtgggggtgtaggatgtagttggggttgtagttttaggttacggagagtttgtgaggttgggtttcggggcgttttggggaggggatgtttgatggggagtttggtgggggagggtaggggagggcgggggaggacgggggagggcgttttgtgtttttgagaaggtatttggaatgatattgttataatttatattatattttaattaaggtttataaataaaaatttattttaaaggtgttagggagtttaaggttttgagtgtttaaggaggtatcgaagatttttttttgtgggttgaaaagttttcgattatttagtttggtttatatagttttttgtatatagggttttcgagtgtaggttatagggaatatagattttatggtgaatgaatgaatgaatgaatgaatgagggaaataagggaggaataggttaatgggaattattttagagtttagatattttttgaattttgttttttatttgtttaggattttttattatgagttgttgttagagtttgggaagggttttggggttgtttttttaagtaggtaggttggttggggtgttgattagggtagttggggtagagggaggtaggggtaggtgggagtagggtgggggttgggtgtagtagtcggggatttttggttattttggattttttcggatggatttgtttttatatttcgatcgttaagatttaagatgaaataagatatagagatttatacgattttcgagagaggtcggtttaagaggggtatatatagggataggtattattttatttttttttaatagggatttaaatattaggtataggggatgtcgttgtgtttaggtttttatatttacgttggcgttttaggggtttgtatggattttgagtttggggttgttagttagggttggggagtagtagaggtagttggtattagttttgggtttcggtttattgcggtcgtcgggtatttatttgtttttttattatgatggtttttgtttgtttggcgtttagtttagatacggttttgcggaagtttttggtttgtggcgtggtggcgtcgggggtgggtatggtttagtgtggaggttcgggtttcgtttttatagttttggtttagtagttttttataagttgagttgacgttaaagttttttttgggttttttatttttttttttttatattttttatttttgtttgttgtgtttgatggaggcgggggtgggtgaggaaggagggaggcgtaggagaaagggttcgttcgtggaatttaattgtttttattttttagttttgtttgaattatttttagttcgcgggtttgcggggattaggggttcgtgttttgcggggggttgagatagttaggttttttttggttttatagtttttaagagagtatatagggaggggtttttttggtagtttaggggtatatttttaatgaatattagaatttcgtggtagatcgatttagaaagttttaaagacgggaatttagtttttagttttagatgttaggaggtaatttgtttgtttttttagaagattttaggtcgtgtgtttcgtagacgtggtttttaggagtgttatttgtttatattttcgggttttgta

SEQ ID NO: 2391 - DNA, 1608 bp, Artificial Sequence
  chemically treated genomic DNA (Homo sapiens)
gtaataatagagatgttttatattattttttttattttatttttttttgtgtttattagatgtttagagtgtgtgtataaggttggtacgtttagggttttttttatggtattaatagtttattgaaaggtggaatagagataagtttattaatatttataagattggtggtaagtgtagtgatagatgtaaaatatagggtgatggaaagtttttaggagggtaatttaatttagatttgagggtttaaataggttttagaagaaaatgttaattgagaggaagtttgaaggatgaatagtgggttaagtaaagggttattaatgtgttattaatgggttgaatttaattgggaagggagagaggttgtagagtgaggtgtagagtttggtggacgatgttaaaggaatattgaaatttttagtgtgtttagtttggaattgtatttaaatttaggtttagtaatgatgttattatttaaatatattttttgtaaaatttatgttaaattatttaagagttatttatcgttttaaagtaatagtgattttgaatagtgtttattagagtacgaaagaattataagatttttttttaaagaaaattggttaggaaataatgagtaacgaaggataggaagtaattgtgaatgtttaatatagttggggttatgcgatttggtttaagttgttagttttgttttttttttgagaaataaaaattaaggggttttttttttttagagttttatggcgtaatatttgtatttttttatatggttaattgtttattttaggaacgtttgtgagttttttatgttgtagttataagatggatagtttagttaaatgtttcgtaagtttttttttgagtgattttagtaattagttaaggtttttgtatttaggtaggatttttgcgttttgagttttatttttttttaagatttttttaattttttaggttgaattatagtagaagtttttagaaagggtaggaggtcggttttcgaggtttttatttgaagtgagatgttagttattgtaggaacgtttcgggataggaatgtttatttgtgtaacgaattttgattttttttttattttgatttttttttttttttattcgcgcgtaggttaagttgttgaattaatggagttttttttaattcgggcgttttttagcgaggttttttttttatttttttgattatcggggtttttcgtgagttcgtttttgatttcgcgtaagagtgatatataggtgtttaaagacgtttttggggagtgagggaagcggtttacgagtgatttggttggagttttaggggcgggtattggtacggaatatattttgaggttagttttggttgtttaggcggagttgttttttttttcgcgggttggtggattcgtttagtacggagttggggaagtttttttatttcggaggattgtttaataattatgttgggtatttggatttttttatttttggtgagtttttttttgttcgggtggaggtttatttcgttttagtttcggggataggtaaagtggggcgggcgcgggacggcgggattgcggcggtacggcgtatcgcgggtta

SEQ ID NO: 2392 - DNA, 1608 bp, Artificial Sequence
  chemically treated genomic DNA (Homo sapiens)
tggttcgcggtgcgtcgtgtcgtcgtaatttcgtcgtttcgcgttcgttttattttgtttattttcgggattaagacggggtaagtttttattcgggtaggagagggtttattagaggtaggagggtttagatgtttagtatggttgttgagtaatttttcgaagtgaaagagtttttttaatttcgtattgagcgggtttattaattcgcgggagaagaggtagtttcgtttgggtagttagggttggttttagggtgtgtttcgtgttagtgttcgtttttgaggttttagttaagttattcgtaaatcgttttttttattttttagaagcgtttttgaatatttgtgtgttatttttgcgcgagattagagacgagtttacgaaaagtttcggtggttaggaggatgggaaggaagtttcgttggggaacgttcgggttggggagggttttattgatttagtaatttggtttgcgcgcgggtagggagggggagaagttagggtgaggaaggagttagggttcgttgtataaatgggtatttttgtttcggggcgtttttgtagtggttggtattttattttaggtgaggatttcgagagtcggttttttgttttttttaaaggtttttgttgtagtttaatttgggaagttggggaggttttgaaggagaatggagtttagagcgtagaggttttgtttgggtataggagttttggttaattgttggagttatttagagaaagatttgcggggtatttgattgggttgtttattttgtggttgtaatatgagaggtttatagacgtttttggaatggatagttaattatatgaaaaagtatagatgttgcgttatagggttttgaaaagggagggttttttagtttttattttttaagaggaaaataaagttaataatttaagttaaatcgtatagttttagttatattaaatatttataattattttttgtttttcgttatttattattttttggttaattttttttaaaaaaaaattttgtaattttttcgtgttttggtgaatattgtttaaagttattattgttttggaacggtagatagtttttaggtagtttagtatgaattttatagaaggtatgtttggataatgatattattattgaatttgaatttggatgtagttttagattggatatattaaaggttttagtatttttttggtatcgtttattaagttttgtattttattttgtaatttttttttttttttaattagatttaatttattaataatatattaataattttttgtttagtttattgtttattttttaggtttttttttagttgatatttttttttggagtttgtttgggtttttaaatttaggttaggttatttttttgagggttttttattattttgtgttttgtatttgttattgtatttattattagttttgtaggtgttgataggtttgtttttgttttattttttagtagattgttagtgttatgaggaagattttgggcgtgttagttttgtgtatatattttgagtatttaatagatataaaaagaagtgggataaggaggatggtatagggtatttttgttattat

SEQ ID NO: 2393 - DNA, 1757 bp, Artificial Sequence
  chemically treated genomic DNA (Homo sapiens)
tttataagatttttttgattgtaagtggagtatagattgattgtaggggattaaaaatggagaaaagaacgtcggttaaaagttgttatattaaatagtagtttaggtaagagatgatagaggtgtggattacgatggttttagaattagtgttgagaaatgtttggataataggatttattgatgggttggatataggatgaggaaagggaggaattaaagttaagttttaggttttgggttagagtagttggtgattttaggggttatttatagaaatggtgagacgattaagagaggggtatgaattattatataaattttgttttggataagttaaggttgaggtatttatttaaatatttagtaggttgaaggattatttagttttaattgtttattaaataaataataagtatttatattgttaggtattacggtaggatttagtttgaagaaaggaatatagttttatgagattatgaaattaaagatttatttacgatttggttagttgttttaggagttagaaaatatagtttagttgagatttgaagaaggaagggaaaattgtaggataaagaagagtatttgaaaaggtttttacggtagaacgcggtaagagtttttaagaaattgagggtttaagtgagtgtcgttcgtagagtgaagaggaggatagttgttgtttcgaggggagagggttttttttgcgagttcggggtggtcgatttaggatttgaggttttagtttgagaattaaagaggacgagaagaatatatttgttgtggcgggttttttcggggaggacgcgggttgggagattaattggatcggattagatttttaaaaaataattattatggttgtagtgtgttaaagatcgaggagaaatttgagaaagaatttatttttagtttttttttatagatttttagggttagggaagattttatattatttttatatagtttgggtttgttaaaaagttttttttaggtataaattaattaggggagcgtgttttttttatttcgttaatgatttcgttttttttatttttttttttgttattgttattatcgtttttatttttattttcgattttttttttttttttttcgtcgcgttggattgggggattcggcggttgcggaattttattttttacggtacgtcgtttagatttggacgttatgttgtcgtttatattgcgtttgtcggtttttttttgtttgatttttcggattagtttatagtagttaagggggtgaggaattacgaagaagttcggcgttgagtgtacgttaattttaatgtttttgttggatttcgtagttatgattttttatagttacgtttagtttgcggttttattttgtttttttttttcgttttttattttttattattttttttaaagttttttttttttttttcgtagtggtttaatttatttaatttttggttttatttcgtggtttggatggcggtgcgtatgcgcgagcgtttasttgcgcgtagttatttacgagattttagtttgaggtgcggggttttggggtttagcgcgggtggttgtcgcggtttttcgggttgcgtggggagggggttttcgttttgttgttattgtttttgtagttttttcgttgggattgcgcgatatcgtttttcgatcgggtgttcgttgtgtgttaggtcgggtgttgggtacggtttcgcgaggtaggtgtcgtcgttcgttgtatcggtacgg

SEQ ID NO: 2394 - DNA, 1757 bp, Artificial Sequence
  chemically treated genomic DNA (Homo sapiens)
tcgtatcggtatagcgggcggcgatatttatttcgcgggatcgtgtttagtattcggtttggtatatagcgggtattcggtcggggggcggtgtcgcgtagttttagcgaaaaggttgtaggagtaatgataatagggcggaagttttttttttacgtagttcgaggggtcgcggtagttattcgcgttgggttttaggatttcgtattttagattggggtttcgtgggtggttgcgcgtagstaggcgttcgcgtatgcgtatcgttatttaggttacggaatgaggttagaggttagatgggttgaattattacgggaaggggaggggaagttttgggaggagtgatggagggtggaaagcggaagaaaaaagtaagatgggatcgtaagttggacgtgattgtaaggggttatggttgcggaatttagtaggggtattggggttgacgtgtatttagcgtcgagttttttcgtagttttttatttttttggttattatgggttggttcggaaggttaggtaaggggaagtcggtaggcgtagtgtgagcggtaatatggcgtttaggtttaagcggcgtgtcgtggaaagtggggtttcgtagtcgtcggattttttagtttagcgcgacgaggaagaggaaaaagaagtcgaaaatgaggatgaagacgatgatgatagtgataaggaaaaggatgaagaggacgaggttattgacgaggtgagaaggatacgtttttttagttggtttatatttgagaaaaattttttggtaagtttaggttgtgtaaaaatagtgtagggttttttttgattttgagggtttgtgaggagaaattggagataagtttttttttaggttttttttcggtttttaatatattgtagttatagtagttattttttaaaggtttagttcggtttagttaattttttaattcgcgtttttttcgaaaaagttcgttataataggtgtgtttttttcgttttttttagtttttaggttgaagttttagattttgaatcggttatttcgggttcgtagagggggtttttttttttcggggtagtagttgtttttttttttattttgcgggcggtatttatttgggtttttagttttttgaaggtttttgtcgcgttttatcgtagaagtttttttaaatgtttttttttattttgtagtttttttttttttttttagattttagttaggttgtattttttggtttttggggtagttgattaagtcgtgggtaaatttttggttttatagttttatagaattgtgtttttttttttagattaggttttatcgtagtgtttggtaatataggtatttattatttgtttagtaaataattaggattgaatgattttttagtttattgaatgtttaaatagatattttagttttaatttgtttaaagtagaatttgtataataatttatgttttttttttaatcgttttattatttttataaatggtttttaaagttattagttgttttaatttaaaatttggggtttaattttaatttttttttttttttattttatatttagtttattagtaaattttgttatttagatattttttagtattaattttgagattatcgtagtttatatttttattattttttgtttggattattatttaatgtaatagtttttaatcggcgtttttttttttatttttggttttttataattagtttatattttatttatagttagagagattttatagg

SEQ ID NO: 2395 - DNA, 2749 bp, Artificial Sequence
  chemically treated genomic DNA (Homo sapiens)
gtttgatttagaatattttttatttaggatgagatgttttagatggtagagtagagagagttttggatataattgaaattttatagaattggtggtaaatgtgtatatatatatatatatatacgtttttatttaattaagtagttaaaaagttagtaattttattgtttttttagtttaattaaagttattgattttttaaatttaatatttagagattatattagatgttatttataatgtaaggaagtatgtattatggagaggttattttgggtgaaaggtatagtaataattgaatagttaatcgaaatttttattaatgggttaagttttgggagtattaatatataaaagtttagaattttattttgtattttttttttttttaaaaagaaagagtattggaaattattttttgtgtggtgtttaatagtggtagattattttgattaaggaattaaatggattgaggtgtatgagagtaagaaagaggaggggtaagaggggggattataggataaggtgtattgttattttaaaattatgtatgtatgattttatttaggttttttttattgtttgaggtattagcggaaagtttgggtagtttagttttaagagggttattaagtagattacgttttgagttttaggtaattaagtgtttgttttgtagaatattttatttgggtatttaagttttttttttagtatttttgttgttatagtttatttgttgagtaattaggggttatagtagcgttgttaggtaacgagggatagcggttttgttgaagagttatttgttatattgaggggattggttgaaatgtaataaagaaatggtaatttagtttatttattaatataattatttgtatagtattagggatttatgtgtaatttataaatttatagttatatgaggaaatatagaaatattttgataaatattaaagtataggatagatagatggtgttgggtttttaattagttttattttgagtttaaagttgttgtatatgttgggataaggggaaaggtttaaagttttttgttagttttattttgggtatttgtaagttagttttgggttataatgtatagtgtatgtgtaaagaaaatttataagatttttttttttgttaagtagagttggtaatgttattgttaattttttggggtgaagtaataatataaaattattgaatgtgtaatatattattaataattatatatatataaaatatatatatatattatataaatatttatgtataattggttataaatattattggttgttttgtggatttataaagtgtttgatttgtttaatgtaattaagagatttattaaaaggatgagtattttattttgagtattgtgttttaaaatgttttttgagaagtttagtagtgttgtttttaggagtttaaagtttttaggtttgggatgagttttagttttaaaggtgtagtagtttttttttgacgttttacgtttttgatttttagatattagtagttatttatgttttcgttattgttaagaacgtcgttggtattattttattttgagaacgtgtttgtagtttttagaaaatggagtatcgtaatattatttaaagtattttgttttaaagtattgttggtaagtggcgtgggtttgattatttatttagaaatgttttattaggaggagaatgtttttttgtaaatatgaattgtttagtttttttattgggttttggttttttgttttaggttattgaaatgttgatttttgtttattttgttttaatatttttgattgagttacgaggtttttttttaaggttggagaacgtgggagtttttaagaaagtttttatcgtgttaatttaagtagtatgtggatttttagatcgaagtattttttgttatagttttgttgttgttgaaagtatttagttttgtatttagcggttttgtatttaggattgtttatatagatttttatattttatttatattgttttttttttagtaggttttagtagttgtattatattagataagaatgatttgtattttaacgtttatagtaattttgtaagttttatttttggaaattataagagttgtttttttttttttttttttttaaagttgatggtattatttattttagttgtatggttgaaatttgagtaataaggtgtaatgtaagtagtagtgtaggtataagtttttataggtttttaaaattagtagtagtgaagattattttagtttgaattttaaatcggaagtgaaggttatatagaatttatggtattgaagattaatttttttagttgtttttttaattaaaattttttttttttttatggatgaaatggattatgaaaaaaaatgtgaaaatagtttattaaaggtaaatgtgtttatgtaggaattatttattttttatagtttaacgcgatttttggttttagtttttaaagtttaaagaagatttagagtgagttttaaggtatggaaatttgtaattaatataaataattaatatttttaaaattttgaattgggtttatataattaatatttttttattagggtataatatttttattaggtagatagtttttttagtttttggggattgttttttttattttcgtttttttaagaagagttgtttgtttgatttatggaagatgtttagtaatataaattgaatatataaatattttttattttt

SEQ ID NO: 2396 - DNA, 2749 bp, Artificial Sequence
  chemically treated genomic DNA (Homo sapiens)
agagatgaagggtatttatatatttaatttatattattgaatattttttatgagttaaataaatagttttttttggggaaacgaggatgaagaaaatagtttttaaggattgggagaattatttgtttaatgaaaatgttatattttagtaaggaaatgttgattatataaatttagtttaagattttgaaaatattaattatttgtattaattataagtttttatgttttaaaatttattttgagttttttttaggttttgaaggttaagattaaaggtcgcgttaagttatagaaaataaatgatttttgtataaatatatttgtttttgataaattatttttatatttttttttatggtttattttatttatagaagagaaaaaaattttaattggggaaataattggaagagttagtttttaatattatgaattttatatagtttttattttcggtttggaatttaggttgaaatgatttttattattattggttttggggatttatgaaagtttatatttatattattatttatattatattttgttgtttaggttttagttatatagttaaggtaaatgatgttattagttttggagaaggaggagaagaaaagtagtttttgtgatttttaaaaataaaatttgtagaattgttatgggcgttaggatgtagattatttttgtttggtgtgatgtagttattgaggtttgttgagaaaagggtagtgtaggtagggtgtgaagatttgtatgggtaattttgaatataaaatcgttgggtatagaattgaatatttttagtagtagtagagttgtgataaaaagtgtttcggtttgggagtttatatattgtttgggttggtacgatggaaatttttttgaaagtttttacgttttttagttttgggaaaagatttcgtgatttagttaaggatattgaagtaaaataggtaaagattaatattttaatgatttgaaataagaagttagagtttaatgaaagaattgggtaatttatgtttataaaaaagtattttttttttgataaagtatttttaaataaataattaggtttacgttatttgttagtaatattttgaagtagggtattttaagtgatgttgcgatattttattttttggaaattgtagatacgtttttagagtaaggtaatattaacgacgtttttagtaatggcgaagatatgagtagttgttggtatttgggaattaaaaacgtagggcgttaagggaaagttgttgtatttttaaaattgaagtttattttaggtttgaggattttgagtttttagaagtaatattattgaattttttaaaaaatattttgaagtatagtgtttagagtaaaatatttatttttttggtaaattttttgattgtattgggtaaattaagtattttataagtttataggataattagtaatatttataattagttatatataaatatttatataatatatgtgtgtgttttatatatatataattattaataatatattatatatttaataattttgtgttgttattttattttagggaattagtaatggtattattagttttatttaatagggaaaagaattttgtagattttttttatatatgtattgtatattgtaatttagagttaatttatagatgtttaaaataaagttggtaaaggattttgggtttttttttttattttagtatgtgtagtaattttaagtttagagtaaagttgattagaaatttaatattatttgtttgttttatgttttaatatttattaaaatgtttttgtgtttttttatatgattatgaatttgtaggttatatatggatttttaatattgtgtaagtaattgtattgataaataagttgagttattatttttttattgtattttaattagtttttttagtgtgataaatggttttttaataggatcgttgtttttcgttgtttggtaacgttgttgtaatttttggttatttagtaaataggttgtagtagtaggaatgttggaaggaagatttgggtgtttaggtaaagtattttgtagagtaaatatttggttatttgaagtttagagcgtggtttgtttggtggtttttttggaattgagttgtttaagtttttcgttggtattttaagtagtgggagggatttggatgggattatgtatatataattttaaagtagtagtatattttattttataatttttttttttgtttttttttttttttgtttttatgtattttaatttatttaattttttaattaaaatgatttattattattaaatattatataaggaataatttttagtgttttttttttttgggggagaagaggatataaaatggaattttaaatttttatatattgatgtttttaaagtttggtttattgatagaagtttcggttgattatttagttgttgttgtattttttatttaggataatttttttataatatatgtttttttatattatgagtagtatttgatgtgatttttaaatgttgggtttggaaaattagtgattttaattaaattaaagaagtaatgggattgttgattttttggttgtttaattggataggaacgtgtgtgtgtgtgtatatgtgtatatttgttattaattttatagagttttaattatatttaaaattttttttattttgttatttgggatattttattttagatgagaaatattttaaattaagt

SEQ ID NO: 2397 - DNA, 7784 bp, Artificial Sequence
  chemically treated genomic DNA (Homo sapiens)
tttgtaaggaagtgttttgtgaggggtattttaggtttttatgtttttggatttttttttggggaggtggcgtggtttttaaggtagaattttagttgggtttgttagaaggagtaggggtcggttttttgttaatacgggtttttagaagggggattggtgaggggcgagggatcgaggtttaaagggaggtgggtgggatggagtagaaaatttattagattgaatattaaggtatttgcggtttggattgattttcgtttagtttagttaatatgttgtgtgtttttgggtgatttttggttttttttaggttttagtttttttgtttggggtaggattgggttgtttaaggttttttttagttttaagtttgaagaatgaggggggaatttgtatttggagttatttttagttttattttttatgtagttttgggtaagtgatatttttttcgggtttttatgttttttaggttatgatgaggggtggggggtattcgtttagtttcgaggtttttttagttttagtaagtgtttttttaggtttgttggttgggttgggtagggagttttttttgtttttttttattttttttttttttttttttttttttttagagggtattatttggagtagttgtttttagggatgaattgagtagataggtaggagggttttgatttgttttatattatttttagggtagtaggtattgaggatttagggcgttgggtaaaggttatttgttgattagtggagatgagggtttgaggtagggtgtttagatgtagtaagcgggcgggagagttgggaaatttttaggagattgagtttacgttgttgtttcgttagttttgtagtttagatgagtttaggaattgggggtgggtttggggagtttttatttttttttagttgattggttttttagggagaggttggtgagaggggaaatggtttggatataggttaggggtttcgggtttattttagttttttatattggaattttaggtttttttttttattagttttaagttttgaatatagtttggagtagaggggtgaggggtttttttagatttgagaataagtgggtggtttgggttggggggtgtttggagtaaaggtatagaagattaggtattagtggtttcggtaaggtttggttatagggttgagtttttatagttttttttagtatttttatttttgggttttaatttaggtaggcgagtgttgtttatttagtagttttttattcgtttttattttgtgtgtttttcgttgttttttttttagtgtagggtaggggttggtggagaagggttaaggtcgtttagagttcgaggtttttgtttttttttttattaggttttttattttgttttttggatttattgataatattttttgggggaggagttggttttatgtttggggttttttttagtttttattaggattgattttttcgtttatttttttgggttttttagtggggttgggggaagagtagtttttattgttttttggttgtgggagtaattgggaggaataaggtttggtgaggagagggtatagaggagttttgcggggagtcggtggtttaggaggggtcgttgatttttttcggggttgagatgttttttgggtttatagtgaagtcgtagtagggatggtaggatgagggcgtttgttttttagatgttgatattttggagttaggatattttaggtttaaatgatgtttttggtacgtaataggatttaggttatagagataatattttagagttttaattttttgaggataaaatggggttggaatattgattttttagagtggtgttgaaaaggaaatgagatagagaagtataaagtagcgggtttacggagggatttatattttttttttttttttaacgttgtgttttttttagatagtagagtttgtaggtagaaggagtttttaatataaaaaatagagttttggtagtaagttgtttttttagaagtaattaatattatagtatgaaattagaggtttgagaaagtggttcggttttgtttttagaattttttatcggtgggtgagatttggaatttttttattagcgatttatttttggttgggtatagtggtttatgtttgtaattttagtattttgggaggttgggacggacggatatttgaggttaggagttcgagattagtttgggtaatatggcgaaatttagtttttattaaaaatataaaaaattagtcgagtatggtgatgtacgtttgtagttttagttatttaggaggttgaggtacgagaattgtttgaatttcggaggtggaggttgtagtgagtagagatcgtattattgtattttagtgatagagttagatttggtttaaaaaagagagagagagagagagagagagagatttatttttttgatttaagattttgttttttgttaaaatgtaaatagaattttgtgaagtagacgttaagtttattttataggttagaaatttaaggttttaagggttttaagtgtatagtttattagtagtaaggttgggaattttaatttaggtttttatatattttaggtaaatattagacggtttagagtattgagatttttatagaggtattagttatacgtttagaataaatttgttttaagttttttgtagattttggtggtggggtagaaggtgaagaagtggttattggaggatttggtattggggatgttttttttttttttgttgcggtttgttttatagttttagaggtaaaggtatagtggggatttagatttaggtaggggtaggtaataaggtttatgggttcgggtgtgttagaatgggttggcggggtttcgtggttttagattttttaagtttttttatttttgtagagggtttggaggagtttggtttttttttttcgtatggtaacggatttagggaggttaggatatgtgggtagagagatttggtagggtgttgagttagatgtagtatatttttaggaagtttggtattttgtttttttttaagggtttggtatttgagaatatttgtggttttttattaatagtttaatttgtatttcggtaggggattttttggtggttagtttgcgttgttttttttttttattatggtttttttgggatgaagattgttttagggagaagttagtggtagatgggaggaagaggggatttgattattcggggttaaaaatggttttttggggttgggttgttttattttgtgtttaggtgaggtttagtatatgagtttttatgttttatgttttttttattaggttgggttgggtagttttgatttagatttgttggttagaggtttttgtttattatatattattatgtcggaagttttttttagtattttatttagtttttttttatggtaataggagttgttttttagttttgttcgggggagggttttttgaagtatacgtgaggtatatgttcgtgtgatttgtttgtttttggttggatttgagttttttgtttttgattttgatttttggattgatttttggtttgatttttgtgtggttggttaggaggggtggttgtagttaatgttgagttattagttttattgttttattaattattaagtttgtttgttgtatagataaggagaggtttggagaggcgatgtttttttcgagattatataggttttttatgtttattaaggtggacgtttttgatttataggattaggtttggttggaaggtagtttgttttttttattagttatttgtattttttaagattgagtatagggggtttttattttttttttgttttttaaaataaatttatttatagattgatgtaaaacgtatttttagattttgggaagtaaatatatttattaataggttatattttcgttacgttgaaaggtaggaggttttttcgcgagcgtgggtgtacgtatgggttgtgttagttttttggtttttagtgatttgtatatttttgtgaatttatatatattttggtggatgttttcggatatgtttaaatggtgtaggcgtttttagtatgggtgtatttaggcgggcgggtgagatagaagcgtttttggattttttatatgttagtggtatttgttgttaggattgtaagttttggaggttaaattgcggttgaggtgttattcgtgatttagttttttttttttttttggtttggggaagggataggggtattgagtattgatttttgttttcgttgtaagttggattgtgtttgatttaggagtagggttgggatcgatgggttttagggaggtgagttttgtaggggtaagacgtggttaatatttagtgattatttttattatgtgttagatattgttgtaagtattataagattattttagtgaatttttatagtttaggaggtaggtataatggttatgttttattaaggtaattgaggtttagagaggttatgagatttgtttaaggatatataggtagtacgtgttggagtttggatgttaagttagggagtggattttagtatttgattttaataattatagagagatggtataggttgtattaaaaaggaggtagtatggtagcgtggggattattatagggtagtggggatttagtagaaggggtgttagagttaggaggttatttgattgtttttgattttaggaaatattaagttatttttggaaattgaaaaaatgaatataaagtaaattagagttagtataattgtggtttattttgatggcgtttatttttataaataaatgtagtttattgttgttaggtattgtatttatcgataggagttaatagtgtaacgtgtttggatgttattttatagttattaggagtggtgtggttcggtagagggatttatgttgacgtggtgtgttatttttttagtggatgtttgtgtgtgattatgtatgtagttttatttagagatttaatagatatttaagtagaagattttttgggtattattattattgttttttattttttaatgggaggttttttgagagttttaggttttaagattttgtttaagttagttgtttttgtttagggagtgtggttggggggtaagaagggtaggagttaggttttaggttggttttatttattattttgtttttggtttatttggcgttttttagagggttgagttttattttgttatttttattagaggagggagtattttgttattttttttgttttgttttaaattaggaatatagtatgattattatatagtatgattattataataatagtaattattttttagagtttattttgtgttaggagttttataggtagttttttgtatttttggtttttgtgtttatggatttaattaattttggattgaaaataattttttaggtcgggcgtggtggtttacgtttgtaattttagtattttgggaggttgaggcgggcggattacgaggttaggagatcgagattattttggttaatacggcgaaattttatttttattaaaaatataaaaaaaaaaaaaaaaattagtcgggcgtggtggcgggcgtttatggttttagttatttgggaggttgaggtaggagaatggcgtgaattcgggaggtagagtttgtagtgagtcgagatcgtgttattgtattttagtttgggtgatagagtaagattttattttaaaaaaaaaaaaaaaatatatatatatatatatattttttttttttttttttaaattgtatttgtgggtcgggtgtagtggtttatgtttgtaagtttagtattttaggaggtagagattggaggattatttaaggttaggagttggagattagtttgagtaatatagcgatattttatttttattaaaaataatgttttaaaaaaattgtatttgggtagggcgtagtggtttacgtttataagtttagtattttgggaggtttatatgggaggattgtttgaggttaggagttggagattagtttgagtaatatggtgaaatttcgtttttgttgtaaatatataaattagttgggcgtggtggtgggtgtttgtaattttagttatttaggaggttgaggtaggagaattatttgaatttggggggtagagattgtagtgagttaagatcgtgttattgtattttagtttgggtgatagagtaagattttattttaaaaaaaaaaaaaattgtatttgtattaaatatatatagatttttttggtgattattttttaaataatatagtataataattatttatatagtattttcgtcgtattaggtattataagtaatttagagatttaaagtatgtgggaggttgtgtttaggttatatgtaaatattatgttattttatattaaggatttgaatatttatggattttggtatttgtagagggttttggaattaattttttatggagattgagagatgatcgtattatttatttcgtaagtaatgttttttttaatgtattgaattattttattgtttagaggagaaattgaagtttagggttttgaataattagattaaggaggtatagtatgggagtgggatatgaagtattttataattaatttttttaggataaggttttgttttttatatttatttgtttaaaggttttttagggttttttttttttgggtgtattttgataagagatttagattttagtttattatgttgtttgtagttttggatggttttattttagtgtttggtgttttgagatggagttagtattagtggcggatgtggagattggggggatttgtttttattggggtagatagaggagatgtggattttgttttttatgagttcggtataaatttagagtcgttagtagggtttcgaggtattagtttcgggtttatgggtttttttaggtgttttttttattgtttttcgtttttttttttttttttatgttgaggttggtggggtgggggtgggggtgtttacgtacggaatagttattatttttaattatcgtttgagttttgatttgttgttagtttttacgtagttttagggttataaaagtttaagaggttttttgggaatgtgttattttttagcgtggagttatattgaggaaggaggaggggagggtagttaggggggtggcgatagggagagagtttaaatgtttggttggttttgagttttagttagtttttattgtagcgtaggtgagtttttttgaggatttttttgttagtttttttgattgtagggaggatttagtgtggtaagaaatttttttagtttagtaagtagtttaggatgtttttgaaggtcgtggttttgattttggttttggtggttgtcgtcggtgagtagaagttgtttttggatggtatttttgggttgttgttttgagtagtgtaggatggaggttgagttaaagtaaaaggatatttttgagtgtttattagtttttagttggatatgaggtttgtttggttgttaagtggtttataggagagttggtttagttttagtggtgggtttattggtattggtgttatattagttttatatatttttgtggtttttaaaaagttaagtttagatagggaaaatggtaggttgaggtatttttattattatttagtttgtagtttagagttggagtagaggggttatataggagacggggttttatgaattgttttttgttattatttagg

SEQ ID NO: 2398 - DNA, 7784 bp, Artificial Sequence
  chemically treated genomic DNA (Homo sapiens)
tttgggtggtaatagagagtaatttatgaggtttcgttttttgtgtggtttttttgttttagttttgagttgtagattggatgatggtgggggtgttttaatttgttattttttttgtttgagtttagttttttggaagttatagggatatgtgaaattggtatagtattaatgttaatgggtttattattgggattgggttagtttttttgtgagttatttggtagttaggtagattttatgtttagttgggggttgatgggtatttagaagtgtttttttgttttggtttagtttttattttgtattatttagagtagtagtttaggagtgttatttaaagatagtttttatttatcggcgatagttattagggttagggttaggattacggtttttaggaatattttgagttgtttgttgggttggaggagttttttgttatattggattttttttataattaggggagttgatagagaggtttttaggagagtttatttgcgttgtagtgggaattgattgaagtttagagttagttagatatttaaattttttttttatcgttatttttttggttgttttttttttttttttttttagtgtgattttacgttggaaggtgatatatttttaagaggttttttggatttttgtgattttgagattacgtggaagttgatagtagattagggtttaagcgatagttagaagtggtggttgtttcgtgcgtgggtatttttatttttattttattaattttagtatggaagggaggaggggaacggaaaatagtaggagaaatatttgagggagtttatgagttcgggattgatgtttcgaggttttgttggcggttttgggtttgtgtcgggtttatggggggtaaagtttatattttttttgtttattttagtgaagataggtttttttagtttttatattcgttattaatgttgattttattttagagtattagatattggagtgggattatttaggattgtagatagtatagtgagttaaaatttaggttttttgttaaggtatatttaagaggagggggttttggagagtttttgggtagatgggtgtgggagatagggttttgttttgaaagggttaattgtagagtgttttatgttttatttttatgttgtgtttttttggtttagttatttaaagttttgagttttagttttttttttgaataatgggatggtttagtatattaaagaagatattgtttgcgaagtgggtagtacggttattttttagtttttatgggaaattgattttaggattttttgtagatattaaaatttatggatgtttaagtttttgatataaaatggtatagtatttatatataatttaagtatagttttttatatattttaaatttttagattatttataatatttaatacgacggaagtgttgtgtgaatggttgttatattgtattgtttaggaggtaattattaaaaaagtttgtatatgtttagtataggtgtaattttttttttttttgagatggagttttattttgttatttaggttggagtgtagtggtacgattttagtttattgtaatttttgttttttaggtttaagtgatttttttgttttagttttttgagtagttgggattataggtatttattattacgtttagttaatttgtgtatttatagtagagacggggttttattatgttgtttaggttggtttttaatttttggttttaagtaatttttttatgtgggttttttaaagtgttgggtttataggcgtgagttattgcgttttgtttagatgtaatttttttaaaatattgtttttaatggagatggggtgtcgttatgttgtttaggttggtttttaatttttggttttaagtgattttttaatttttgttttttaaaatgttgggtttataggtatgagttattgtattcggtttatagatgtaatttaaaaaaaaaaaaaaaaaatatatatatatatatatattttttttttttttttgagatggagttttgttttgttatttaggttggagtgtagtggtacgatttcggtttattgtaagttttgtttttcgggtttacgttatttttttgttttagttttttaagtagttgggattataggcgttcgttattacgttcggttaatttttttttttttttttgtatttttagtagagatggggtttcgtcgtgttagttaggatggtttcgattttttgatttcgtgattcgttcgttttagttttttaaagtgttgagattataggcgtgagttattacgttcggtttaaaaaattatttttaatttaaggttggttgaatttatggatatagaaattaaggatatagagggttgtttatagagtttttggtatagagtaagttttgaaaaatagttgttgttattataataattatattgtataataattatattgtgtttttgatttggagtaaagtagggagggtagtagagtgtttttttttttagtgagagtggtagaatgagatttagttttttgaggggcgttaggtgggttagaggtagggtgatgggtgggattagtttgaggtttgatttttgttttttttgttttttagttatattttttgggtaggagtagttggtttgagtagaattttgggatttgaggtttttaggggattttttattgggggatggagggtaatggtggtggtgtttaggaggttttttatttagatgtttattggatttttaaatgaggttgtatgtataattatatataaatatttattgagaaggtgatatattacgttagtatgggtttttttgtcggattatattatttttagtgattatgaggtgatatttaggtacgttgtattattggtttttgtcggtgagtgtagtgtttgataatagtgagttatatttatttgtaaaaatgaacgttattagagtagattataattgtattaattttaatttgttttgtgtttatttttttagtttttagaagtggtttaatgttttttagggttaaaggtagttaaatgattttttgattttggtattttttttgttgggtttttattgttttgtagtggtttttacgttattatgttgttttttttttgatgtagtttgtgttatttttttgtgattgttggggttagatgttggagtttattttttggtttggtatttaggttttaatacgtattgtttgtgtgtttttgggtaagttttataatttttttgagttttagttattttggtgagatataattattgtatttgttttttaggttgtgaggatttattgagatgattttatagtgtttgtaataatgtttggtatatagtaaaagtgattattaaatgttagttacgttttatttttgtaaggtttatttttttggaatttatcggttttaattttgtttttgaattaggtatagtttagtttgtagcgggagtaaaggttagtatttagtgtttttgttttttttttaggttagaggggaggaggagattgagttacgaatgatattttagtcgtagtttgatttttaggatttatagttttagtagtaggtgttattagtatgtgagaggtttagaggcgtttttgttttattcgttcgtttgggtgtatttatgttgggagcgtttgtattatttgagtatgttcgagagtatttattagagtgtgtgtggatttatagaagtgtgtaaattattaagaattaagggattggtatagtttatgcgtgtatttacgttcgcgaggggattttttgttttttaacgtggcggggatgtgatttgttaatgaatgtatttattttttaaagtttgagggtacgttttgtattaatttgtagatggatttgttttggggagtagggagagaatgagagttttttgtgtttagttttagagggtgtaagtagttgatgggaagagtagattgttttttagttaggtttggttttgtgagttagggacgtttattttagtgggtatgaaaggtttgtgtgatttcgagggagatatcgtttttttaagtttttttttatttgtgtaataggtagatttaatgattggtgaggtaatgaggttgatagtttagtattagttatagttattttttttggttaattatatagggattaaattaggggttagtttagaggttagagttaggagtagaaaatttagatttagttagggataggtaggttatacggatatgtgttttacgtatgttttaaggggttttttttcgggtagaattgaaggatagtttttgttgttataggaaggagttgggtgagatattaggaggaattttcggtatgatgatgtgtgatgaataagggtttttggttaataggtttgaattagggttgtttagtttagtttggtgggaagggtatggagtatgggggtttatgtattaaattttatttggatataaggtgaaatagtttaattttagaggattatttttggtttcggatggttaaatttttttttttttttatttattattggtttttttttggagtagtttttattttaggggagttatgatgggagagaggggtagcgtaggttggttattaagagattttttgtcggggtgtaggttggattgttggtgaggggttataggtatttttaggtattaagtttttggaaggagataaggtattaggttttttggaggtgtgttatatttagtttagtattttgttaggtttttttatttatatgttttgatttttttgggttcgttgttatgcgggagagagaggttaggtttttttagattttttgtagagatggaaaggtttggagggtttggggttacgggatttcgttagtttattttagtatattcgggtttatagattttgttgtttgtttttgtttggatttgggtttttattgtgtttttgtttttggggttatggagtaggtcgtagtagaagaggaaagggtatttttaatattaaattttttagtgattatttttttattttttattttattattaaagtttgtaggagatttgagataggtttgttttgggcgtgtgattgatgtttttataggggttttagtgttttaagtcgtttggtatttgtttggggtgtgtgaagatttggattaaggtttttagttttattattaatgggttgtgtatttggagtttttagagttttaggtttttaatttataaaatggatttaacgtttattttatagggttttatttgtattttaatagaaaataaagttttaagttaaaggaatgaattttttttttttttttttttttttttttttttagattaagtttagttttgttattggagtgtaatggtgcgatttttgtttattgtaatttttattttcggggtttaagtaattttcgtgttttagttttttgagtagttgggattataggcgtgtattattatgttcggttaattttttgtatttttagtagagattgggtttcgttatgttgtttaggttggtttcgaatttttggttttagatattcgttcgttttagttttttaaagtgttgggattataggtatgagttattgtgtttagttaggaatggatcgttaatagaggaattttaagttttatttatcgataaagaattttgagggtagagtcgggttatttttttaggtttttgattttatattgtggtgttagttatttttgagaggatagtttgttgttagagttttattttttatgttagaggttttttttgtttgtagattttgttgtttgggaagggtatagcgttaggagggagagggaggtgtgagttttttcgtggattcgttgttttgtatttttttattttattttttttttagtattattttgggaaattagtattttagttttattttatttttagaaaattgaggttttgagatgttatttttgtgatttgggttttattacgtgttaaaggtattatttaagtttaagatgttttggttttaaggtgttagtatttggaagataggcgtttttattttgttatttttgttgcggttttattgtgggtttaggggatattttagtttcgagaagggttagcggttttttttggattatcgatttttcgtagaatttttttgtgttttttttttattagattttgttttttttagttgtttttatagttagggggtagtgagggttgttttttttttagttttattgaggaatttaggaaggtgaacgagagaattagttttggtgggggttggggagggttttagatatgagattagttttttttttaggggatgttattagtgggtttagagggtaaaatagggagtttggtggagggaggggtaaaggtttcgggttttgagcggttttggtttttttttattaatttttgttttatattaagggggaggtagcggggggtatatagggtgggggcgggtggggggttgttgggtgagtagtattcgtttgtttggattgaaatttagagatggaggtgttgggaggggttgtgagagtttagttttgtaattaggttttgtcggagttattgatgtttggttttttgtgtttttattttaaatattttttagtttaagttatttatttgtttttaagtttgaagaagttttttatttttttattttaggttgtgtttagggtttggggttggtggagggaggggtttgaaattttagtgtgaaaggttgagatgggttcgaggtttttggtttatgtttaagttatttttttttttattagtttttttttggggagttagttagttaggaaggaatgagggttttttaggtttatttttagtttttgagtttatttgggttgtagggttggcgggatagtagcgtggatttagttttttagggattttttaattttttcgttcgtttgttgtatttggatattttgttttaggtttttatttttattggttagtaggtgatttttgtttagcgttttgggtttttagtgtttgttgttttggagatgatataaaataggttagaatttttttgtttgtttgtttagtttatttttagaggtagttgttttaggtaatgttttttggggaggggaaagaggaggggaggaggatgaagaggggtaagaggagttttttgtttagtttagttagtaagtttggagaagtatttgttagagttaaggaagtttcggagttggacgggtgttttttattttttattataatttgaagaatatggaggttcgggaggggtgttatttgtttaaagttatatagggggtggggttggaagtggttttaagtgtaggttttttttttattttttaggtttagggttggaggaagttttagatagtttagttttattttagatagggaaattgaggtttggagagggttagaaattatttaaagatatatagtatgttggttggattggacggagattagtttagatcgtaggtgttttgatgtttagtttggtgggttttttgttttattttatttatttttttttgggtttcgatttttcgttttttattagttttttttttgagagttcgtattagtagggagtcggtttttattttttttggtagatttagttaaggttttattttaggggttacgttatttttttagggaggggtttagaggtatggggatttggggtgttttttataggatatttttttgtagg

SEQ ID NO: 2399 - DNA, 9219 bp, Artificial Sequence
  chemically treated genomic DNA (Homo sapiens)
aaattttgggaggttaagatgggtagattatttgaaattaggagttcgagattagtttgagtagtatagattttgttttaataaaaattttaaaatattttttaaaattagttaggtatagtggtatatatttgtagttttagatatttgggaagttgaggtggaaggatgatttgagtttatggttttgaggttgtagtgggttatgatggtgttattgtattttagtttaggttatagagtaagatattatgttaaaagaaaaaaaaatttaattatttttgtttattttttttttttttttttttttttttttttttttttttttttttttttgtaatatatatatatatatatatatatacgtacgtatgtacgtattatatattttgacgatttttaaaggttttttgtggttggatgaaatttagaggttttattttttttgtatggttttgtatgatttggtttttgtttttttttttgattttattttttattcgttttttagtttttttttttgttttagttatattggttttttgtttgtcgttaatatttttagtttggtttcgttttttagtttttgtagtagttgttttttttatttgaaatgttttgtttttaaatttttatttggttattattttttgttatttgggttttagttttagtgttatttaaatatttaaagaggattttgttgattattgtatttaaaagtagttttttgttatttttataatattagtttgttttatttttttatagtattaattttttttttagtttttttttttttcgtttggttttattggaatataagttttataggtgttggtattttttttgatttttttgtttttatgttttttttgttttaggataatgtttagtatgtgttaggtacgtagatatttattaaatggaggaatggatgaataatttataaagtaggataaagtttaattttaggtttgtggtttagattggatttatatttagagttagatttaagtttagtgttaggagtggtggtaaattggttttaagattagttttagaaatagggttgggttggggtagaggagaagttttatttagggggttattaattgggatgtgtttagatttgaggttagggttatagttggggttgagtttgagttgtgatttgggttgaggttaaatttgggttagggttgatgttggtattaaattttaatttaggttttgaggttaagtttaagtttgaagttaatgttattttagttttatttggaggttttagagattttattagtttttttataaagattattataaagattgtatttttttgagtttggggtataagattttagttattagtttttttatttagggaaagttttaaattaattgttggtttgtttaagaaagaaattaaatttatataattttcgaaattgagattgaaattaagattggtttattttaaggagtatttttcgtatattttatatgtacgtgatattgagttttagtttagttttattttttttttttttgtgttttttatgtttttttattattttttttgtttttttttttttgttttttaatgttttattttttttttttaatttaaatttttttttgtgttttattgttaattgtaatatttttttttgtttgtttgttttgttttgttttgttttttggttggtttgtttgaaatggagttttattttgttgtttaggttggagggtagtggtacgatttcggtttattgtaattttcgttttttgggtttaagtagtttttttgttttagtttttttagtagttaggattataggcgcgtgttattatgttcggttaattttttgtatttttagtagtgatggagttttatcgtattagttaggattgtttttattttttgattttgtgatttgttcgttttagttttttaaagtgttgggatgataggtatgtgttattgtttttggttttgtaataatattttatattttaatatagtttagttggggttttagtttattagtttatattattagagaagtagaaagagataataggaagtaaaaaggattttgagagaaagggtaatatagagaaaaagaaaggagtaggggttaaaagggaaatttatattgatataagagataataaggttaaaagaatgagaagaaggttgggcgtagtggtttacgtttataattttagtattttgggaggttaaggttggtgggttatttgtggttaggaatttaagattaatttggttaatatggtgagatttcgtttttattaaaaatataaaaaaaaatttggcgggtttggtggcgtgtgtttgtaattttagttattcgggaggttgaggtaggagaatagtttgaatttgggaggtagaggttgtagtgagttaagatcgtgttattgtattttagtttgtgcgatagtgagaaattgttttaaaaaaaaaaaaaggaaaagaaattttttgatttattttatttgatagtaggttataagatttttattttagaagaggttttgttttatatttgggaggaaggaatgttgtatagagagattaagaagaatatggttaggttttgttgggatttttttagttttagtttgtgattattagatgatattttttttgtttaattatatttttgtatagttgtttattttttattaaatttaagtataaaaatagtttttttttgggtttttgggtttttatttttgaaggtttttatgttatttaaaattttgattaaataaatgtattatgttttttttttgttaatttgttttttattataggagtattggttataatttttatgatgggttaggaagggattatttttttttgtttttatagaaataatagttaagattagtaaagtataaaaggtaaaggggtaggtttttaagtagagaagaataggagaaatagtttatatatatttagaatgttatttatatgtttttttatgttatattaagattttttagggattttgtgtttggggagagaagtggtttgttttatgtaatagtgggttttatttcgggttattattagttttagttttaatttttttaatattttttaagtaaaattatattagtagtagtaataatatttgaggtgataagttggtattattttaaatttaggaaaagtgaataaagttatttttagaaattgttttttttaaattttgtaatttgtaagttaagtgaaaatgggtttatgtatgagaatgttcgtgttagatattttttgtgttagataaaaattagaaataaattaaatttttattaatagaatatattagaatatattgatataatagaatattatattataatttttttaaaaaatattattgatatatataattacgtatatgaattttataaatataatgttgattgaaagaagttaaatagaaatgagtatattttgtgtgattttatttatatgatgttttaaattaggaggaaataatttatggtgataaaagtgagagagtggttggttatttttggagggtattagtagggagggggtatgagggaatttgttggggatttgaaaatacgtggagttgggtggtggttatatatagatggaaaaatttattagttgtatatttaagaggtgtttattttatatttaagttatatattaataaaaaggaaaaaaattttggaaatttttttttttttttttgagatagagttttgttttgttttttaggttggaatatagtggtgcgattttgatttattgtagttttcgttttttaggtttaaataattttttagttttagtttttcgagtagttgggattgtagatgcgtattagtacgtttggttaatttttgtatttattatagagatggggttttattatgttggttagttggttttaaatttttgattttaagtaattcgtttattttagatttttaaagtgttaggattataggtgtgagttattgtattaggtttggaataattttaaaataatgtattggttttgtaaatgtagttttagaataagttttttagttgtttttattttattttaagttattatttttaagttttatttatgtggaattttgaaattttttttgtagaaaattttggaaggtgtttgttatattgattttggaatgtgtgtttatttggggttatataaatttgttttgtggaagttatttgaagttaggaagagatggagggtattttttaggagtgagatgagattttattatatttgattgtttagtattatttttgagtaaggggattaaaaaatttattttttaaattaggatatttttaagagtggaagggggatttattaatatttttatttggataagaggtaaatattagaatgttttcgatgaaggggatatataatggatttttttgatgtgaaatttgttagatgggttggaaagttcgtatattgggataagtatgatttgagttgtttgggataaggataggggtataagagaaggaaatgggtaaagagagaagtttgtatttagttaagggtgtagagatgttatatatgattgttttttagggaatcgggtttttagtttatattttagttgtttaatcgttttttttttgaattgattgttttttttttggaattttaggtttgattttattttttggtttttttagtttacgatttttttgattcgatttttttttttagaatttagtcgtttgaatttttagtttgtggtttttttttaggttttagttttttttgtttttgattgaaatagtagtattttttaagttttgggggttttttcgggttttagtttcgatttagaattcgttcgttgtttgttacgttgttattgtcgttttttttataaagggatttgagcgttcgggtttaggggttttatatagtaggtgaggtttttttgttttatttttttgggttgttcgtgtttcgtgttttggattatcgtttcgtagtgttttgttttttgtttgggtttcggttttttttgtatttgttgtttggattttcggtttgtttgggtttgggttttggtgggtttggttttggtttttttttttgtttttgattttttatttgttagttttattgtttttgttatatattttttgtttttgttatggtttttttttgttttttttttgtttttttttgtttttttttgtttattttggggtttttttgattgtattttgtttttttttttgtcgatttttttttcgggggtcggggggtgttgttttttagggcgggaggtttgtttttcgtcgcgtgtttcgtttcgtttattgtttttttttttttttttttttttttgtaggttttttttatgatattatttgaacgttttttttttttaagggtgtgtggtattattttatattttttttttttggggttgttgttggttttgttgtttggggtttaggtgaggtagtaggagaatgggggttgttggggtggtttagttaaattttgagttttagagttttttttaattttgtttttttttaggggttttttggtgttggttttatatttttagttgtttagattgttcgttagtattttaagatgtattttgtttatagtaattttaaatttgttgtttattttattggtaaatatttatttgattttttagatatgtttttattagttttttttttatttttgttttaggaatttaagtatttattttttttttttaattttttttacgttaaaaaaaatagagggagtttatttttatgtttttttttgttattttttaggaatttagttgtttagtgtttatttttttagggattgagatttttgatttagatttttgattttttatttttattttttatggttttttttaggagattttagtaagtagaatttattgttttggagagtaaatacggatcgtgtttttttttaggatggtttttttttgagtaataatttttttttggtttttattagtggtatttatttcgtttatttttaggtggttttttttgggaaagtttatttttttaaggttattttttttttattttatttggtttatgaggtttagtttttttttttttagtattttttttatgtgtttttttttagtttttagaagatggtgtatttagggttgtaggaattttggttgtattcgatgtattacggggttgcgttttagtttatttagggagattagttatttatttatatagatggtattttttatttagtttttagttttagtattgttttttttggagttttcgttttgtagaatttggaaaaatttagaaagaaaaaataattgattttaagattttttttttattttgtttttattttgattattttaggggtcgttattattttttttttggttattttaatagtttaagttttttttgattaagttatcggagtttttaaagaaggaattttaggtattttaggggattatatttttttgaattatttttgatgtttgtttggttgaggattttaagtttgtttaggaatttttagtttaaagttgttggtttgttttattagttaggtggggtttagatttatatatagaggaagagtaggtatatggaggagtttgggggatgattagaggtagggaggggattatttatgaaggtaaaaaaattaaattatttatttatggaggatggagagaggggaataatagaagaatatttaaggagaaatagagataggtttaagagatgaagagtgagagggtatgcgtataaggttgattaagagagaaagaagtaggtatgagggattatagggttttagaaggtagggaaaggttttgaaagttagttgtcgattagagttttatacggaggtatttgtattttcgatgaagtttaataaattttttttttttgaaatgttgtttgtttgtgtgtgtgtgtttgggagtgagaattttttagtttatttaaggaatggagggagggatagagggtttaaagggagtaagagttgtggggagaataaaaggataagggtttagagagttttagggatatgtgatggatttattaggtgaggtcgttagattgttgtaggggaagtaaaggagaagttgagaagatgaaggaaaagttagggtttggaggggcgggggttagggagtttttgggagatatggttatatgtagcggttttgaggaatgggttataggagatttttggggagatgtgattatagtaatgggtaggagaatgtttagggttatggaagtcgagtatggggatttttttttaacgaagatagggttatgtagagggttttagggagtgaaagagtttttaggatttttaggtatggaatataggggacgtttaagaagatatggttatatattggggttttgagaagtgagagttttatgaaaaaaattagggattttagagttttttggaagttaagattgaaattagtattatgagttttcgggttagaatgaaagaagaaggtttgttttagtggggtttgtgaattttcgggggtgattttatttttcggggttgttttaggtttgtttttgttatttttatttagttttttttgaggttttaagtttgttattaagtttttagtttttttttttcgtagggatttaaatataggttttaggatttaatatagtttttttttttaatttcgtttttttttttttaaggatttagttttttgaagttttttttagttttagttttattttttttttgtattttgtttggaagttagaaggaaatagattatagatttggtttttaaaagaaatggaggtaataggttttgaggggtatggggacggggtttagtttttagggttttatatataaattagttagtggtttagaagatttttttcggaatcggagtagggaggatggggagtgtgaggggtatttttgatgtttgtgtgtttttaattttttaaattttcgttttcgcgatggagaagaaatcgagatagaaggtgtagggtttattatcgttttttttagatgagtttatgggtttttttattaaggaagtttttcgttggttgaatgatttttttttcgtttttttttcgttttagggatatataaaggtagttgttggtatatttagttagtagacgtttttttagtaaggatagtagaggattagttaagagggagagaagtaattatagattttttttgaaaataatttttagacgttatattttttgataagttgttaggtaggtttttttttttttatatattgatttacggttttatttttttttttttggaaaggatattatgagtattgaaagtatgattcgggacgtggagttggtcgaggaggcgttttttaagaagataggggggttttagggttttaggcggtgtttgttttttagtttttttttttttttgatcgtggtaggcgttattacgtttttttgtttgttgtattttggagtgatcggtttttagagggaagaggtgagtgtttggttagtttttatttatttttttatttaaggggaaatggagacgtaagagagggagagagatgggatgggtgaaagatgtgcgttgatagggagggatggagagaaaaaaacgtggagaaagacggggatgtagaaagagatgtggtaagagatggggaagagagagagagaaagatggagagataggatgtttggtatatggaaggtgtttattaagtgtgtatggagtgaatgaatgaatgaatgaatgaataagtagatatataaataagatatggagatagatgtggggtgtgagaagagagatgggggaagaaataagtgatatgaataaagatggtgagatagaaagagcgggaaatatgatagttaaggagagagatgggggagataaggagagaagaagatagggtgtttggtatatagaagatatttagggaaagagttgttgaatgtttggaaggtgaatatatagatgaatggagagagaaaattagatattttagggttaagagcgtaggttagataggtagttagttgttttttttttaagggtgattttttcgatgttaattattttttttttttttaatagt

SEQ ID NO: 2400 - DNA, 9219 bp, Artificial Sequence
  chemically treated genomic DNA (Homo sapiens)
attgttggggagaaggagaatggttaatatcgagggagttatttttaaaggaggaatagttggttgtttgtttggtttgcgtttttagttttgaggtgtttggttttttttttttatttatttgtgtatttattttttaggtatttaatagttttttttttgagtgttttttgtgtgttagatattttatttttttttttttttattttttttatttttttttttagttgttatatttttcgttttttttgttttattatttttatttatattatttgtttttttttttatttttttttttatattttatatttgtttttatattttatttatatatttgtttgtttatttatttatttatttatttattttatatatatttagtgagtattttttatgtgttagatattttgtttttttattttttttttttttttttttttattttttgttatatttttttttgtattttcgtttttttttacgtttttttttttttatttttttttattagcgtatattttttatttattttattttttttttttttttgcgtttttatttttttttgggtgggagagtggatgaaggttggttaggtatttattttttttttttgggggtcgattattttaaagtgtagtaggtagaagagcgtggtggcgtttgttacgattaggaaggagaagaggttgaggaataagtatcgtttggagttttggggtttttttgtttttttggggagcgttttttcggttagttttacgtttcggattatgtttttagtgtttatggtgttttttttaggggagagagggtggagtcgtgggttagtatgtgagaggaagagaatttgtttggtagtttgttaggggatgtggcgtttgagggttgtttttagggggggtttgtagttgttttttttttttttagttggttttttgttgtttttgttgagggagcgtttgttggttgggtgtgttaataattgtttttatatgtttttggggcgagaggagggcggggaaagaattatttaattagcggaaaatttttttggtggagaaatttatgagtttatttggaggaagcggtagtgggttttgtattttttgtttcggttttttttttatcgcgggggcggggatttggaaagttggggatatataagtattaaggatattttttatattttttattttttttgtttcgatttcgaggggggttttttgggttattgattgatttgtgtgtaggattttggaggttgaatttcgtttttatgttttttaaaatttattgtttttattttttttggggattaggtttgtggtttgtttttttttaatttttagataggatgtaggaaaaagatagaattagaattgggaggggttttagaaagttgagtttttgagggagagaaaacggggttggagggaaaagttgtgttgagttttgaggtttgtgtttgggtttttgcggggagaaggagttgggggtttggtggtaggtttgaggttttaggaaaggttgggtgggggtagtagggataagtttgggatagtttcggggagtgaaattattttcgggaatttatagattttattggggtaggttttttttttttattttgattcggagatttataatgttggttttagttttggtttttaaggaattttggggtttttgattttttttatgaagtttttattttttagggttttagtgtgtggttatatttttttaaacgttttttgtattttatatttggaggttttggaggtttttttattttttggggttttttatatggttttgttttcgttaagggggggtttttatattcgatttttatagttttggatatttttttatttattgttgtggttatatttttttagaggttttttgtaatttattttttagagtcgttatatgtggttatattttttaggagttttttgattttcgtttttttagattttgattttttttttatttttttagttttttttttgttttttttgtagtagtttggcggttttatttggtgagtttattatatatttttgaagttttttgagtttttatttttttgttttttttatagtttttgttttttttgagttttttgtttttttttttattttttagatagattgggaagtttttatttttagatatatatatataagtagatagtattttagagaaaagaggtttattgggttttatcgagggtgtagatgttttcgtgtggggttttggtcggtagttggtttttagagtttttttttgttttttggggttttgtgattttttatgtttattttttttttttttggttagttttgtgcgtatgtttttttattttttattttttgggtttgtttttgtttttttttggatgtttttttattatttttttttttttattttttataaataaataatttaatttttttgtttttataaatagttttttttttgtttttagttattttttaagtttttttatgtgtttgttttttttttgtgtgtggatttaggttttatttagttggtgggatagattaatagttttgggttgggaatttttaggtaggtttgaaatttttagttagatagatattagggatggtttagggaggtgtggttttttgggatgtttagaattttttttttgaaagtttcggtgatttgattagggaagatttgagttgttggaatggttaaaggagaggtggtgacgatttttgaaatggttagaatggaggtagaatggggagaaggttttgaaattaattattttttttttttggatttttttaagttttatagagcgaaggttttaaagaagatagtattagggttgaggattaggtgggggatgttatttgtgtgggtggatagttggtttttttgggtgagttggaacgtagtttcgtggtatatcgagtgtagttagggtttttgtagttttggatatattattttttgggagttgaggagaggtatatggaaggggtattgggaggagaagagttggattttatgggttaggtagagtggggaggaggtggttttgggagagtaggtttttttagagaagattatttgggagtagacgaagtagatgttattggtggggattaggagagaattgttgtttaaggagaaattattttggaggaaggtacggttcgtgtttgttttttagagtagtgagttttgtttgttggggttttttaggaagagttataggggatgggggtgggagattaggggtttggattagaggttttaatttttgaggaagtgggtattgaataattgagtttttgggggatggtagggggaggtataggagtgggttttttttgttttttttagcgtgggggaagttgggggagaggggtggatgtttgggtttttgaggtaggggtaggaggagagttggtggggatatgtttgggaggttaggtggatgtttattaatgaggtgagtagtaggtttgaggttgttgtgggtaagatgtattttggggtgttgacgggtagtttgggtagttgaaggtgtgaggttaatattagggagtttttaggggagaatagagttgaggggggttttagggtttaaggtttggttgagttattttagtagtttttatttttttgttgttttatttgggttttaggtagtagaattagtagtagttttagaaggaggaggtgtagggtggtgttatatatttttgggaggaagagacgtttaggtggtgttatggggagaatttgtagagaaagagagagagagagagagatagtgagcggggcggggtacgcggcggaagatagatttttcgttttgggagatagtatttttcgattttcgagagagagatcgatagagaaggggataagatgtagttagagaaattttaaggtgagtagagggagatagagagagataggaagggaatagagaggaattatggtagaaatagagaatgtgtgatagagataatgagattgatagatggagagttagagatagagaaggaaattaaaattaaatttattaaggtttaggtttaggtaggtcggggatttaggtagtaggtgtaggagggatcgaggtttaggtagagggtaggatattgcggggcggtagtttaaagtacgaagtacgggtagtttaaggagatggggtaggagagttttatttgttgtgtggagtttttgggttcggacgtttaggtttttttatagaggaagcggtagtggtagcgtggtaggtagcgggcgggttttaggtcggggttggggttcggggaagtttttagggtttagaagatattgttgttttagttaaaggtaggaaaggttgaggtttaggagagaattataggttgggggtttaggcgattgagttttgggaaagggagtcgggttaggggaatcgtgggttgggagggttagggagtggggttaggtttagagttttaaagaagggatagttaatttagagaggaggcggttgagtagttggggtgtgagttggaggttcggttttttgaagagtaattatatataatatttttgtatttttggttgagtataggtttttttttttgtttattttttttttttgtatttttgtttttgttttaaataatttaaattatatttgttttagtatacggattttttagtttatttggtaggttttatattaagaaggtttattatatattttttttatcggggatattttggtgtttgttttttgtttaggtgaaaatattaatggattttttttttatttttgaaagtgttttagtttggaagataaattttttggtttttttatttagagatgatgttggatagttaagtatgatgaggttttattttatttttgaaggatgttttttatttttttttgattttaggtggtttttatagaatagatttatataattttaaataaatatatattttaggattaatgtggtagatattttttaaagttttttataaaggaagttttagaattttatatgggtgaggtttaagggtggtgatttagggtggggtggggatagttaagggatttgttttgaagttgtatttgtagagttaatatattattttaaaattgttttaggtttggtgtagtggtttatatttgtaattttggtattttgggagtttgaggtgggcggattatttgaggttaggagtttgagattagttggttaatatggtgaaattttatttttataataaatataaaaattagttaggcgtgttggtgcgtatttgtagttttagttattcgggaggttgaggttggagaattatttgaatttgggaggcggaggttgtagtgagttaagatcgtattattgtattttagtttgggggatagagtaagattttgttttaaaaaaaaaaaaaaaagtttttaaaattttttttttttttattgatatgtaatttaggtatgaggtggatattttttaagtgtatagttgatgaatttttttatttgtatgtagttattatttagttttacgtatttttaggtttttagtaggtttttttatgttttttttttgttgatattttttaaagataattaattatttttttatttttattattatagattatttttttttggtttggggtattatataaatgaaattatatagaatgtatttatttttgtttgattttttttagttagtattatgtttgtgagatttatatacgtggttgtatgtattagtaatgttttttaaaaaaattatgatgtaatattttattgtattaatatattttaatatattttgttgatggggatttggtttgtttttagtttttgtttaatataaaaaatgtttaatacgaatatttttatatatgagtttatttttatttagtttgtaagttataaggtttaaaaaaagtagtttttaaagatgattttatttattttttttaagtttgagataatattaatttgttattttaaatattattattgttattgatgtgattttatttggagagtgttagaggggttggagttggggttggtggtgattcggggtaaagtttattgttgtatggggtagattatttttttttttaggtataaggtttttgaggggttttggtgtaatatggagggatatgtaagtaatattttgggtgtgtatgagttattttttttgtttttttttatttgaggatttgtttttttgttttttatgttttattagttttagttattatttttgtaggggtagaaaggggtgatttttttttgatttattataagggttatggttaatatttttataataaaagatagattaataagagaaaagtataatatatttatttaattaaagttttaggtgatatgggagtttttagaaatgaagatttaaggatttaggggaaaattatttttatgtttagatttgatgaagaatgaatagttgtgtagaaatgtaattgaataaaaggagtattatttaatggttatagattgggattggggggattttagtaaggtttggttatattttttttggtttttttgtatagtattttttttttttaggtatagggtagaattttttttggaatgagggttttataatttattattagatgagataggttagaaaatttttttttttttttttttttttgagatagttttttattgtcgtataggttggagtgtagtggtacgattttggtttattgtaatttttgttttttaggtttaagttatttttttgttttagtttttcgagtagttgggattataggtatacgttattaagttcgttaaatttttttttgtatttttagtagagacggggttttattatgttggttaggttggttttgaatttttgattataggtgatttattagttttggttttttaaagtgttgggattatgggcgtgagttattgcgtttaattttttttttatttttttaattttattattttttgtgttagtgtgggttttttttttagtttttgtttttttttttttttttgtgttgtttttttttttagggttttttttgttttttgttgtttttttttgtttttttaatggtatgagttgatggattgggattttagttgagttatattaaaatataaaatgttattataaggttaggagtagtggtatatgtttgttattttagtattttgggaggttgaggcgagtagattataaggttaggagatagagataattttggttaatacggtgaaattttattattgttaaaaatataaaaaattagtcgagtatggtggtacgcgtttgtaattttagttattagggaagttgaggtaggagaattgtttgaatttaggaggcggaggttgtagtgagtcgagatcgtgttattgttttttagtttgggtaataaagtgagattttattttaaataaattaattaaaaaataaaataaaataaaataagtaaataaaaaaaggtattgtaattaatagtgagatatagagagaaatttaaattaaagaggaagaatgggatattgaaagataaaaaagggaaggtaagaagggtgatggggagatatgagagatatagaggaaggaagggtaagattgggttgaggtttagtgttacgtgtatgtgagatatgcgaaggatgttttttgagatgggttaattttggttttaattttagtttcggaggttgtatgaatttggttttttttttgggtaggttagtagttggtttgggattttttttgggtgggagagttgatgattggagttttgtgttttagatttagggaaatatagtttttatagtggtttttgtggagaaattagtgaaatttttgaagtttttaaatgagattgaaatgatattagttttaaatttgaatttagttttaaaatttgaattgggatttaatattaatattaattttaatttaaatttaattttaatttaaattataatttaaatttaattttaattgtaattttaattttaaatttaaatatattttaattaataattttttaaataaaattttttttttattttaatttaattttgtttttagggttaattttgaaattagtttattattatttttaatattaaatttaaatttgattttaaatgtaagtttaatttgagttataagtttaaagttgaattttattttgttttatgaattatttatttatttttttatttagtgagtatttgcgtgtttaatatatgttgggtattgttttaaggtaggagggatatggaggtaaagggattagagaaggtattagtatttgtggagtttgtattttagtgaggttagacggaaaagaaagaaattgaagaagaaattggtattatgagaaaataagataggttgatgttgtaagagtggtagggagttatttttaaatatagtagttagtaaaattttttttgagtgtttgggtggtattggagttgagatttaaatgataaaaaatagtgattaggtaaaagtttgggagtaaagtattttaggtaaagggagtagttattgtaaaggttggaaggcggaattaagttgggggtgttgacgataaatagaaggttagtgtggttggagtagagagagagattgggaggcgggtgggagatgaggttagagaggagggtaggggttaggttatgtagggttatgtaagaagggtaaagtttttagattttatttagttataggaagtttttaaaggtcgttagagtgtgtggtgcgtgtatgcgtgcgtgtgtgtgtgtgtgtgtgtgtgtgttgtaggggagagagggggagggagagagagagagagagagaaagagggaggtgagtagaggtgattggattttttttttttttgatatggtgttttgttttgtggtttaggttggagtgtagtggtattattatagtttattgtaattttaaaattatgggtttaagttatttttttattttagttttttaagtatttaggattataggtgtgtgttattgtgtttggttaattttaaaaaatattttaaaatttttgttgagatagggtttatgttgtttaggttggtttcgaatttttggttttaagtgatttgtttattttggttttttaaagttt

SEQ ID NO: 2401 - DNA, 9110 bp, Artificial Sequence
  chemically treated genomic DNA (Homo sapiens)
aagttgttaagaataaggtttattttaagagatattaaatgaaatttaaagatgataagatggtaaaattgattattatgtttagaaacgtttggtaatataggataaaaataaatataatatatttaaatagaggatgatagtttatataataaatagagatattaattgttagattgtttatgttcgtatagagggggatatgatagtttgcgtagtatatgtatacgaattgttaaaatatggtgtgaaggttggtttgataaattatgttgtaatatattgtattggtttgttgttggtttataggttttttaataggtttggtatggataagatttatgaaggttaagtggaggtgattggcgataatataatgtagaaagtattgatggttagttaggtgtttttatttgttatttggatgtaggttttgttagaattattattggtaataaagtttttggtgatttggatggaggtttgtttattttttaaagtattaaatgattttttggttatgattttgaaagtaaggaatttaatgtagaattatattagaagtataatataggttagaatgttgtagattatatgtattatttaatggaagataaagatgtttataagaaatagtttttttaatatataaagaatagtataattttagatatgatgaaggagatgaaagtttatgttgttataggagagaatttagtttatgaaaagaagtttaagaaagaagttaaaaagaggtggaattattttaaaatgttttttgtttagaagaaagatcgtatagtttaaaagaaggtaagtttttttacggtttaggagggggttgtagagagttaaattaaataattttttacgaggattttttagataaagataataaatttatggatagaaaaaaaaaattgtttttattgtagtttagtataaagcggtgatttgtaatttttgtttatttttatatatatttagtttgttaatttggtgatagattggatatattttgggagttcgttgacggtattttgtttataattttaatgtaaaatgtaatttagagttgatgttgatgagaagtgatagtatagttaagttaaaagtataaatattggatagtttttggaattttggatttgtattttgttatagtataaataattttttatatttggatttgaatttttttttaagtatatgattgatgatgaatttgaaaagatatatttataagtaaaggagtaggtaaatatagtttatggaggggattattttaggaaaggtaagtagttttaggttattggtattgtgaggtaaagtttaaaagggaagaagaattagatgaaaggttttttgtatgttatgatgtatttgggttttattaaggtaaagagaaaatattatttaattatttgattgataagattagataattatttttaaaagaatattttggttataattaatagaaatgtttattggggtagggaggagtatgtaggagtggtagggaattatttgtttttttagatttattttttatttatattatattcgttaagtaaattgaatatttgatttttagaaaacgttatattttttatgttttaatgttttggtatattttatttgtttagattgttggtttttttatttatttcgatgagtttttttaaattaaatattttttttttgagatttgttgtgatttaaatagaatataaagttgaatatttttgtaattttgaattattaaatgtatggatgataatataattattttattttatagaggaagttatagaagtaaggaaaggagggagtataattagttttgaattgtgtggagtgggaatggaagaagggagttgatttgggataaagatagtatagggttaaaaatgtggaaaaaagtttagtgatatatagatttggagttattgatataagtggtattttaaagttaagaatggtaagattgttagggaaattatagaagtaagaaaagagggttaagggtaggtagatttttcggaattataggttaattattttttatttgaaatgtttgggattagtattgttttagattttgaattttttttagggtttggaatatttgcgtatatataataagatattttagggatatgggagatataagtttaaatataaaatttagttatattttttatatattttacgtatatattttgaaggtaattttatatagtcgttttaataattttgtgtatgaaataaagttttgattattttgattgttatttattatatgagatcggatgtggaattttttatttgtgttattatgtcggtaattatttagattttagagtattttaaatttttagattagggatgtttaatttatattaatattaaaaggtaagatagaagaagagatgaaagattagaaagagtgttattatagaagttaagagatatttatagtatgagttaggggtgaatgttatagagagtttaataagatgagacgtaggtgagcggatttttagagtattggtaggtttaggtaaggattgggattttttgagtaaatgattaggtattaagaagtttaggtaaggaatgaagattttttaagaagatttattataaagtgagaaaagagggaaggtgttagttagagggaagttaagattgttttggttttgtttttaagagttgagggatttgtatatatttataggttaaggagagttgatatcgaggttgatgtttggaattttagtattttgggagattaaggtgtgtggattatttgagtttaggagttggagattagtttgggtaatatagtaaaattcggtttttataaaaaaaaaaagaaaaaaaaagaaagaaaaaaaaattagttgggtgtggtggcgtgcgtttgtagtagttttagttatttaggaggttgagatgggaagattatttgaggttggaaggttgaagttgtaatgagttatgattatattatagcgagatttcgttttaaataaaaataaataaataaataaatataggttaaggagtagaagtaggtggatgtggaaagaatgaataggataaggtttttggtgagatgaataaggataggattttatgaataaggaataaggattaggattaggattttataggattaattttagattaattaaaagaaaaaatgtgattttttgaattatatatattttatagtatggattttattcgttgttttttattacggttaaaattatatcgtatttttagtaatttatgtttgatgatgataaaatacgtattaggttatagttatttgtaattagaattgggaatttatttgaattgattttataacgtattgtttatattttttaagaaatagtaaggtattagtttcgatttttgttttttttcgtttttgtagatggattaaatatttattgggtttttagttttgttaattgttatattaaatagggtattttagaacgtatgttattcgagaatgttgtattgttttatttgtaagtattgtatttgtggatagtttggtttacgttttttttaaagtttgcgagttttgaaaggtaatagaaggttcgggtgaataagaattacgagtaaataaacgagaattgttttttggaaggggatatggtagtttttaagagatagtgattattcgttttttttaagggttagattaaaagtagtttaagcgatggtttaggtgtagtcggtaggattgataattagttaggggcgtcggagggagatttttacggaagacgattcgttgtaaggaatttattttatttattggattgtcggtgtgggagagaaggaaggtaggggaagaggttggaaggaaagaagaaagttagcggggttcggttcggtgttaatttgtgagtatgtcggtgattttttcgttgagagttttttgcggcgtttttcgtttgtttatggcggtttgtattcgagaattttagagtgtttagaattagggattagagtttttttttagtttgaaggaggtattaggatttggagacgggagtaggagtaatttagtttcggcgcgatcggcggaataatggttgttttcgatggggggcggggcgtacggcgtttgttgtgacgttacgcgttttgggcggggcgggtcggggttagaggggcgagttttcggtaggtgaggagagagaattcggagggttcgtggattcgtggacgtggatacggcgcgggggaaataggtattttagaatgatagtttaggggtttttttatgggaagatttggagttttgatttaagatattaaatttgtttttttagtgtttatttggaattttttttttagaaggggaaacgggagtgcgattttgattttgaaatatttgcgttggtggggtagttttttgtataaaaatgtgtattgtaatagttatttaatgtatggcgcgttttgtacgtggttagaggcgatattggcgttatattgttaaaattttttttaaggatatcgggtagtttatattttagtgtagttttttacgtattagggcgttgtcggagttcggcgtgaattatgtcgagaataggaattttttcgtatacgtgttagtatatttgttaattagtgttaaaagatattttatttttaatttttttgtttttgcggtagggattaaattaatgaagagattataagaaagggagaagtgttttatttagattatgagtaatggaattttaattataatatgatgatttatatttgagaaatttatagtttgtttgagaaatggaaatgttatattagtaatagtttattttataagcgtaatttttgggtttatatcgaattgtaattttaggtaattgttttgtgtatcgaaaaattaaaatttattataaaatgatacgtagttgttgtagagaaatttggaaaaatgtataaaaggagaaaattaaaattagtgattttattttatagttgaattattaatattttgggacgtatatttttagttttttaatttagtttattaaaaatttttattattttttaataaatattattagtttttttgattagtaaggttgtggtgattgtgtttttttataatattagtgtatattttaagttatgtttattggaaatttgtaatttttttttttttgaattttttatttatattatttattatttttttaatgggggtagtttgttattaatttggtagattttttttatatattattatttgtttttttatggatagtttttgtaaaaattttgtatatatttgtattttttttaatttattatttgaggaataaaagttaaaaaaattttatgtttgtaatttaattatttgattagttaagttgtagtgagtagtgattatttttatttattttttatatttttatttatatatatgatttgttttagttttttttgtttatatttttttttgtttaatttttattttaggtgatatttagattattttgttttgaagaattatttttttttaaataaaaatgtatttatttttgaattttaaaagttataaatgtagggaattgtgggattagttttataaatttttttgttttgagatagagttttatttttgtttcgtaggttagagtgtaatggtacgatttcggtttattgtaatttttgtttttcgggtttaagtgatttttttgttttagtttttcgagtagttgggattataggattttgttattatgtttagttaatttttgtatttttagtagagatggggttttattatgttggttaggttggttttaaatttttgattttaagtgatttattcgttttggtttattaaagtgttagattataggcgtgagttattgtatttagtttatttttataaatattatatttttaaaattagtgttagagaaattaaggaaaataatttattatttgtttttatcgttttagaataatcgatatttgatttgttttataaagttttttttgaaataatttgttttaattggtttttaagattttatatgttttgggttttttttttttttattggttagtttttagtagggtgtgtgtgtgcgtatatgtgcgtttgagtattggtttttagttttttttttattttttagtttttatgggaaatggttttatattttagttttttaattagtttttttaatttgtttagttttatttgtttaaatggtatgtttagtttgaaagttttttaaatttatagtttaagttttgattttttttttgagttttagttttatatattaggttgtttattggatagttttagtttataataggtattttaaagataaaatgttttaaagaatttttgatttttgttttattagtttttttttaatttttttttattttagttaatagtattttaatttattttgttattaggttaaatttataagagttatttttaattgttttttttatattttatatttcgtttgttagtagattttgtttgttttgttttaggaatatgtgttgaattggatgattttttatttcgagttgttattgttttagattaaatttttatgattttttgaattgttattaaagtttttttagtgggttttttgtttttgtttttgtttttttatagaatattttttaaatagagggtgatttttttaggatgtagtattaaaatatgtttttatttatatatttttttattgtatttaggataaaatttaagtttttggcggggcgtagtggtttatatttgtaattttagtattttgggaggttgaggtaggcggattatttgaggttaggagtttaaggttagtttggttaatatggtgaaattttatttttattaaaaatataaaaattagttaggcgtggtggtgggcgtttgtaattttagttatttgggaagttgaggtagggaggttgaattttggaggtggaggttgtagtgagttaagatcgggttattgtattttagtttgggtaataagagtgagtttttaaaaaaaaaaaaaaaaaaaaaaaaaaatttaagtttttttttatggtttataaggttttatgtgatttattttttgtttgtttttttattgtattttttgttattttttttattgtttaggatatatatacgtttatattttatatatatatgtgtttgtttagtattgtttttttattgtatggttttttttttggttgttttttttttattatttaggttttagtttggtagttatatttttgttacgtttttggattaggtttaggtttttatttgtgtgttttttttatagtattaagaaggattggaaatatttatacgtggttgtatattatgtattttttgtttatttttttttttattaatgtgtaatgttagttttacgggagaagggatttaatttttgtttttacgtaagtatttaataaagttaataatttaaattgtagttttgttgaagtgttaaatacggttatttgtaattttagtattttgggaggtggaggtaggaggatcgagtttaggagtttaagattagattgggtaatatggcgagattttattttttttataaaaataagaaaaatgtattgggtgtggtggtacgaagagatgaagtatgggatttttggatttatttaattattttagtagaagttaggaatagagatgggattattttagaaaatttgtggaggatttttttgtttaatggtattgaattttatgatattatataggggatttataagatttttgagaatgttatattagtagagatagtttagtttggaagtgatagagatagtgtgaaatgagaaaaggttgttgaaatttaaattgttacgggtaagaaatgggttgatagagttattgggttgtaaatatgcgattttttaagaaaaagtaagaatgattttaagggtagagttaggggtatagaggtagaggttagaggagtagatagaagtgatggatgtagagatataggtttatgaggttattgtgagtatagatttagaggtttatggagttattatgggtatagagaggtttatggttttgttgtgagtagatataaaggtttgtataattgttgtgggtttagtgggcggtattttaagttagggaattatttgtaggttttgaattttaatggaattttttttgttagattaaaattggttgggaatggtgatttttttattttttttaatttttttttttagaatgagaatatttattatatgtttattatattattttaaataaatttatttatttaaattttaaagttatttggaagttgataatttgtagtattataggtttatagttagagaaatttaattttaaaatgaattatgtacggggttttatttatatttgatttagatgatgagatgtaggatttttgagttaatatatagatgtaaatttggttttagtttatgttgtatgagttgagattttgggagatgttgggaggaataaatgttttttttatgtaggataaatatggattttggggtgttagagggtggattgtagtgggttgaatggtggtttttaagaagatgtttatattataatttttagagtttgtgaatattattttatatggtaaattgtgattatatgaaatattttgagataaagtgtttattttggattttttaaattggttttaaatttaatggtaagtatttttgtaagagatatatagtagagatgtgatagagaaagcggtagtaatatgatttaggggtagagatgtagttataagttaaggattgtttaaagttaatagaagttggacgttattagggatagaatttttttagagtttttagaagaggtgtgattttgtttatatttttattttagatttttggttttcggaattgggagagaataagtttttgttatttaagttattaaagttgtggtaattagttagggtaggtttaggaaattaacgtaggtagagagagtaggtttttttgtttgtgtttattgg

SEQ ID NO: 2402 - DNA, 9110 bp, Artificial Sequence
  chemically treated genomic DNA (Homo sapiens)
ttaatgggtatagataagaaagtttgttttttttatttgcgttagttttttagatttgttttagttagttattataattttggtggtttaaatgatagaaatttatttttttttagtttcggaggttagaagtttgaaataaaggtgtgaataggattatattttttttgaaggttttagggaggttttatttttggtggcgtttagtttttgttggttttaggtaatttttggtttgtgattgtatttttgtttttgggttatattgttgtcgttttttttgttatatttttgttgtgtattttttataagaatatttgttattggatttagagttaatttgaaaaatttagggtaagtattttgttttaagatgttttatgtaattatagtttgttatatgaggtaatgtttataggttttggagattatgatgtggatatttttttgggggttattatttagtttattatagtttattttttggtattttaaaatttatatttgttttatatgaaaaagatatttattttttttaatattttttaaagttttaatttatatagtatgaattaagattaaatttgtatttatatattagtttagaagttttgtattttattatttaagttagatgtgggtgagatttcgtgtatgatttattttaggattaaatttttttggttgtggatttgtgatattataggttattagtttttaaataattttggaatttggataaataaatttatttaaaatgatgtaataggtatatgatagatgtttttattttgaaagggaaaattggaagggataaagaagttattatttttaattaattttgatttagtagagaaaattttattaggatttaaggtttgtaaataattttttagtttgaagtgtcgtttattgggtttataatagttgtgtagatttttgtgtttgtttatagtagaattatgggtttttttgtatttatggtggttttataggtttttgagtttgtgtttatagtgattttataggtttgtgtttttgtatttattatttttgtttgtttttttggtttttgtttttgtgtttttggttttgtttttggagttatttttgtttttttttgaaggatcgtatgtttgtagtttagtagttttattagtttattttttgttcgtagtagtttggattttaatagtttttttttattttatattgtttttgttatttttaggttaagttgtttttgttgatgtaatatttttaaaaattttgtgggttttttgtgtaatgttatggagtttaatgttattagataagagggttttttataaattttttgggataattttatttttatttttgatttttattgagatggttgaatgagtttaagagttttatgttttattttttcgtgttattatatttagtatattttttttatttttgtaaaagagatggggtttcgttatgttgtttagtttggttttgaatttttgggttcgatttttttgtttttattttttagagtgttgggattataggtggtcgtgtttgatattttagtaaaattgtaatttaagttattaattttattgagtatttacgtggaaataaaaattaagttttttttttcgtggagttggtattgtatattggtgggaggaggagtgagtagggagtgtataatgtgtaattacgtgtgaatatttttagttttttttagtattgtgaaggaaatatataagtaaaaatttgggtttggtttaggaacgtgataagggtgtgattgttaggttgggatttgaatgatgagaagaaggtagttagggaaagaattatataatgaggggataatgttgagtaggtatatgtatgtatgaaatatgggcgtgtgtgtgttttaaataatgagaaaagtggtaagaaatgtagtaggagagtaggtaggaggtggattatataaggttttgtgggttatgaaaaggagtttggatttttttttttttttttttttttttttggagatttatttttgttgtttaggttggagtgtagtggttcgattttggtttattgtaatttttatttttagggtttaatttttttgttttaattttttaagtagttgggattataggcgtttattattacgtttggttaatttttgtatttttagtagaaatggggttttattatgttggttaggttgattttgaatttttgattttaggtgattcgtttgttttagttttttaaagtgttggaattataggtgtgagttattgcgtttcgttaggagtttggattttattttaagtgtagtgggagggtgtataaatagggatatattttgatattatattttaaaaagattattttttgtttggggaatattttataagaggataagagtagaagtaggaagtttattgaggaggttttggtaatagtttaggaggttatgggagtttgatttagggtagtggtagttcgggatgagaggttatttagtttagtatatatttttgagatagaatagataaggtttgttggtagacgggatgtggggtgtgaaaagagtaattaaaaatgatttttatgggtttggtttgatagtagggtggattaaaatgttattaattgagatgggggaaagttaaggagaagttggtggggtaagagttaggagttttttaggatattttatttttgagatgtttattatggattagagttatttagtagatagtttgatgtatgagattggaatttaagggagaggttaagatttgaattatgagtttaggagatttttaagttagatatgttatttaaataggtaaaattggataagttggaaaagttggttagaagattgaagtgtgaagttattttttataaaggttggagagtggaggaggagttgggaattagtgtttaggcgtatatgtgcgtatatatatattttgttgaggattggttagtgaggaaaaaggaagtttagagtatgtggaattttagaagttaattgaagtaagttattttaagaagaattttgtgaagtagattaaatgtcggttgttttaagacgataaggatagataatggattattttttttggtttttttggtattaattttaaaaatatagtatttgtaaaaatgggttaggtgtagtggtttacgtttgtaatttagtattttaataggttaaggcgggtggattatttgaggttaggggtttgagattagtttggttaatatggtgaaattttatttttattaaaaatataaaaattagttgggtatggtggtaggattttgtaattttagttattcgggaggttgaggtaggagaattatttgaattcgggaggtagaggttgtagtgagtcgagatcgtgttattgtattttggtttgcgggataagagtgaaattttgttttaaaataaaaaaatttgtaaaattgattttataattttttatatttgtaatttttaaaatttagaggtaaatatatttttatttaaggaggaataattttttagagtaaaataatttgaatattatttggaatagagattggatagaaaaaagtgtgaatagggaaaattaggataagttatatatgtaaatgagagtataaagagtaaatgagagtggttattgtttattgtagtttaattaattagatagttaagttgtaggtataaagtttttttaatttttattttttaagtaataaattgaggaaaatataaatatgtataaaatttttataaaagttatttataaaagggtaagtagtaatatatagaaaagatttattagattagtaataaattatttttattaggaaaatggtaaatgatatgaataggaaatttaaaaaaagaagaattatagatttttaataagtataatttaagatatatattgatattgtaaggaaatataattattataattttgttaattaaagaaattaatgatatttattggaaaataatgggaatttttaatagattgggttagaagattagaagtgtacgttttaaaatattaatagtttagttgtagggtgagattattgattttaattttttttttttatatatttttttagatttttttatagtaattacgtattattttgtaataaattttaatttttcgatgtataaagtaattgtttggaattgtagttcgatatgaatttaggagttacgtttgtaaaataaattattgttgatgtgatatttttattttttaagtagattgtaaattttttagatgtaggttattatgttataattagggttttattgtttatgatttagatgaaatattttttttttttttgtggtttttttattaatttggtttttatcgtaaaggtagggggattaaaaataaaatattttttgatattggttggtaggtgtattaatacgtgtgcgggaggatttttgttttcggtatggtttacgtcgggtttcggtagcgttttagtacgtaaggggttgtattggagtgtggattgttcggtatttttagagaaagttttgatagtgtgacgttagtgtcgtttttaattacgtataaaacgcgttatgtattgggtagttattatagtgtatatttttgtgtaggaagttattttattagcgtaagtattttagaattaagatcgtattttcgtttttttttttagggaaaggattttagataaatattgagaaaatagatttaatattttaggttaaaattttaggtttttttataggaaggtttttgggttgttattttgaggtgtttatttttttcgcgtcgtgtttacgtttacgagtttacgaatttttcgagttttttttttttatttgtcgagggttcgtttttttagtttcggttcgtttcgtttaggacgcgtgacgttataataagcgtcgtgcgtttcgttttttatcgggggtaattattgtttcgtcggtcgcgtcggagttgggttgtttttgttttcgtttttaagttttggtattttttttaagttgggagagggttttagtttttggttttgaatattttggggttttcgggtgtaggtcgttatgagtaaacggaaggcgtcgtaggagatttttaacgggggaattatcgatatgtttataggttagtatcgggtcgggtttcgttggtttttttttttttttttagtttttttttttgtttttttttttttttatatcgatagtttagtgggtagggtaggttttttgtagcgggtcgtttttcgtggggattttttttcggcgtttttggttggttgttagttttgtcggttatatttgggttatcgtttgggttgtttttggtttggtttttgaaggaaacgggtggttattgttttttagaggttgttatatttttttttagaaaatagttttcgtttgtttattcgtggtttttgtttattcgagttttttgttgttttttagaattcgtaaattttgagaagaacgtgagttaagttatttataagtataatgtttataggtgggatagtgtagtattttcgggtagtatacgttttgggatattttgtttagtgtggtaattaataggattgagggtttagtggatatttggtttatttgtaagagcgggaaaaagtaagaatcgaggttggtattttattattttttgaagaatgtgggtagtgcgttataggattagtttagataagtttttaattttgattgtagatagttgtagtttgatacgtattttgttattattaaatatgaattattagaaatgcggtgtaattttaatcgtaatgaaagatagcggatgaagtttatattgtgaaatatatgtggtttaaggaattatatttttttttttggttggtttaaagttgattttgtgggattttgattttgatttttgttttttgtttatgggattttgtttttgtttattttattaggggttttattttatttattttttttatatttatttgtttttattttttagtttatatttatttatttatttatttttatttgagacggggtttcgttgtggtatgattatggtttattgtagttttaattttttagttttaagtgatttttttattttagttttttgagtggttgggattattataggcgtacgttattatatttagttaatttttttttttttttttttttttttttttttttttgtagagatcgggttttgttatgttgtttaggttgatttttaatttttaaatttaaatggtttatatattttggttttttagagtgttgggattttaggtattagtttcggtgttagttttttttagtttataaatatgtgtaagttttttagtttttaaaagtaaaattaaaataattttaatttttttttagttagtattttttttttttttttattttatggtgaatttttttgaaaaatttttattttttgtttggattttttaatatttaattatttatttaagaagttttagtttttgtttggatttattagtgttttgaaaattcgtttatttacgttttattttattggattttttgtggtatttatttttggtttatgttgtgaatattttttgatttttgtaatggtattttttttggttttttatttttttttttgttttattttttaatgttggtataggttgagtatttttaatttgaaaatttgaaatgttttaaaatttggatgattgtcgatatgatgatataagtggaaaattttatattcgattttatgtagtaggtggtagttaaaatggttaaaattttgttttatgtataaaattattaaaacgattatataagattatttttagggtatgtgcgtaaggtgtgtgagaaatatgattgaattttgtatttagatttgtattttttatatttttaagatattttattatgtatacgtaaatattttaaattttgaaaaaaatttaaaatttgaaataatgttggttttaggtattttagataagggatagttaatttgtggtttcggggagtttgtttgtttttagttttttttttttatttttgtagtttttttggtaattttgttatttttgattttgaaatgttatttatgttagtgattttaaatttgtgtattattggatttttttttatatttttagttttatattgtttttattttaagttagttttttttttttatttttattttatatagtttagagttgattgtgtttttttttttttttatttttgtgattttttttgtaaagtaaaataattgtattattatttatatatttgatgatttaaaattatagagatatttaattttgtattttatttggattatagtaggttttagaaaggaggtgtttagtttgaagaagtttatcgggataagtgagagggttagtagtttagataaataaaatgtgttaaagtattgagatatgaagggtataacgttttttggaagttagatgtttagtttgtttaacgggtatggtatgagtgggaaataagtttggaaaagtaggtgattttttattatttttgtatgtttttttttattttagtagatatttttgttgattgtggttaaagtatttttttgaaaatagttatttgattttgttagttaaataattaaataatattttttttttattttgataaaatttaaatatattatagtatataaaaggttttttatttgatttttttttttttttaggttttgttttatagtgttaatgatttggaattatttgttttttttgaaatgattttttttataaattgtgtttgtttgtttttttatttataaatatgtttttttagatttattattagttatgtgtttagagagaagtttaaatttaaatataaagggttatttgtgttataatagaatgtaaatttaaggttttaaagattatttagtgtttatgtttttgatttagttgtattgttattttttattagtattaattttgaattatattttgtattgaaattatagatagaatatcgttagcgagtttttagggtgtatttaatttgttattagattaataaattggatatgtgtggaggtgggtaagaattataggttatcgttttatgttgaattgtagtgggaataattttttttttttgtttataagtttattgtttttatttgaaaaattttcgtagaaaattgtttggtttagttttttgtagtttttttttgagtcgtggggaagtttgtttttttttgagttatgcgattttttttttgagtaagggatattttgggatggttttatttttttttaattttttttttgagtttttttttatagattggatttttttttatagtagtatgagtttttattttttttattatgtttgaagttatgttattttttatgtattgagagaattgttttttgtaagtatttttattttttattaagtagtgtatgtaatttgtaatattttggtttatgttgtgtttttggtgtaattttgtattgaattttttgtttttagaattataattagggaattatttggtattttgagggatagataagtttttatttaggttattaaaaattttattgttagtggtagttttggtaaggtttgtatttaaatagtaggtgaaagtatttggttgattattaatgttttttatattgtattatcgttagttatttttatttggtttttatagattttgtttatgttaaatttattgagaagtttgtgggttagtagtaggttagtataatatgttgtagtataatttgttaggttaatttttatattatattttggtagttcgtgtgtatatgttgcgtagattattatatttttttttatacgggtataagtaatttgataattgatatttttgtttgttatatgaattattattttttatttgggtgtgttgtatttatttttattttgtattattaagcgtttttgagtatagtaattagttttattattttgttatttttaagttttatttggtattttttaaagtaggttttatttttaataattt

SEQ ID NO: 2403 - DNA, 8294 bp, Artificial Sequence
  chemically treated genomic DNA (Homo sapiens)
  unsure 4568, 4570..4571, 4576: n is a or g or c or t
tttggagagggagggagatgggaggtgagtaggttgagggtacgatttcgttggttaaggtggggattgttatttgggagagggtgggtggttttttttatttatcggatttggggtaggtgttgatgagtaggttattaggtcgggtttggaagttttgtaggggttttagtgtttttgtaaagtatttgatgagcgggattttttttacgtattttagtggcgggcgggaggtgttttggattagttttatgtttttgcgttaggggttagagttaggttcgtttttttattattattataatagtaagaaagtggaatttttgtttttagggaagttattgaggtttagggaggttgagtgatttgttcgtatttataaagttatttagtggcggggttggggttgaaaattaggtcgggttttaatgcggtggttttttagtttggttttattttttatttatttgcggagttgtttaaaattttagggtttgggttatggtgtagattagtgaaagtattttcgtcgggtaaggtttagatgttagggtgtgtgaaggtttttaggagagtttagttgtattgaggaagttttaggatttttttgtgttgtttttttgttagttagcgttttttgttttattattttttgttgggatttttagtttttatttagtggagatgtttttttttttgagttttttagttttttatatgtggaaatcgtttaggttagttaggtttgtgatttatttgtttggttatagtttatttgggttttaggataaatacggtttattgaggaattgagttgttattaggggttagagttgttgtgggaatgaataaaattttgatgatttagtaaaagtataggtttaggtagggtggtttttatttataattttagattttagggaggttgaggttaggagttggagattaatttggtgtagtattgtaagattttatttttaaaaatttttaaaaaaatttttaaatattaattaggtaggatgatgagggtttgtagttttagttattttagaggttgaggtaagagaattatttgagtttaggaatttaaggttgtagtggttaggattttatagtattttagtttgggtgatagtaagatttggttttttcggggaaaaaaataaataaataagggaagggagggggatttacgtaggttagggttgtttgaaatgggatatttatggggaaagggtagggatgttagaggttttagtttttggaatgttagagttataagttgagtagggtgagggcgttttgggtcgttttattgtgttatttatttgagtttttgggaatttggtttcgtgtttttttcgttcgtagtggttgattgtgggtgttgtgtggggaatgtagggttgttttttgagttgagggttttttaggtttattgtgggagggatttggagtcggggttggatttagatttgttttcggaaggaaggggtggggttgggggtgggggagtttttttattattttttttagtgtgttagttggagataagtttaaagtgatttttaaagttacgattgagtttgttgtgtagaaaatagaagaatgaaaggggaaaggtttaatggtgggtttgtttttgtaggttttttttttttgtttttttttttttttttttttttttttcgagttgttattgggtttttgatttgtttttgaattttattttgttaggtagttaatagataagttttttttaattgatttaggtaagagaggggagggattggaggagaaagttgggataggtaggttttggaaaggttatttatttgttggttttaggttagttttgaaggtgttaggggttttggtttagtgtagtttataggtttttagtagtttatgtattttaggttttgattataaggttagtttagagggatgtgtgtgggtagagtgaaggggtaggggtggagtagagtatggatgtatagaataagaaagaataaggatattgtagttttattgttttgggagttagttttagttttatggtttttggggattttagagaatattgatagaagattttagaagaattataattcgtggtaggtggttttatttttttgggtttgaaggaggttttatagataagagattagaggaggtcgaggtttggaagttatagggtttcgtggaaggggggtatttttttatttttttcgttttttatttttattttaaagtttaaggttaagttgtgtacgagataggtaaataattatttgagtaaaggtgaattttttaagatttttaagaaatgcgtgagtttagaggtaagcggataggtgggagtgtgggggaagttgaggtatgggaattttaggtagaggagaggttttttatatgttagggttatggatttttttttttttttttgtgtttatgaggaattttcgtgattggtaggtttttaggttattagttttatttttgtttttagtaatttttaggaggtttttttgattaagattttgtattgtattttagtaataatttgtcggatttatacggggtgatatagaaaagaggcgagaatgtgagattaatagagtggtagtaagtgaatataaaattttaggtagtagttttatatgaggagaagaaggaaatttgaaatagttgtatgcgttaagggttaataagtttttgaaaaataggatgaggattaagttggttacgattaattagatataatatggcgttgtatttgatgtaggttttatttaggattttattgtataattagtaatatatgaaatcgtatatttattagtgttaagacggttttaggaatatttgtatttgggtgtaaattgtggtattacggttttgagaaatttttatttttttttggaatttttatgaatatatttttttttagttgaagaagtttataaaggttagttttatattttgtagggtatgagatatttttttgaggatttttacgttttttttttttagtgagtttttttattttgtaggaaatttgtttacgtttatgatttttgtatttgtttttaaattgtttttggttaaggtgttaagagtttggagaaggtttggtacggtggtttatttttgtaattttagtattttgggaggtcgaggtaggtagattatttgaagtcgggagtttgagattagtttgattaatatggagaaattttgtttttattaaaaatagaaaattagttaagtttggtggtatacgtttgtaattttagttatttgggaggttgaggtaggagaatcgtttgaattcgggaggcggaggttgcggtgagttaagattacgttattgtattttagtttgggtaataagagtgaaattcggttttaaaaaaataaaataaaataaaaaaaagcgtggaaacgggttgaggtcgatgttttatcggtttttgatgattttttttaggttattagtatttggaggggattagggatattgagttttagtagggttatttagtgtgtttgtagaaataaggttggttataggtagtttaggatagggagtggggtagggaggttggggttaaagtttatttacgttttttaatttcgagttttttattatttttttcgtgtttatttattatagttagattaggttatttaaagtagtgacgttttatagttattaaggtatggggttagagagagagatagagttaggtattataagttttttttaggtttagttttgaatattaagattaggatacggttgtttcggttcggaattgtataattgggtattttttttttaaagttggattatgttggggtcgggggattgtatttagttagggtattggttttttaggggtaaaaattgttttggttttttcggaaggaattttttttataggtagattacgttggtttttagttaatagataacgttggggtaatataaggggtttcgttttattttgttttacgttagaggtaggttatatataatgagggagaggtaatttgtaataatttttttatgtagtaagtattgttgcgggtattatataattgtatttcggaggtaaagtgattgttatttgtatttataatgagaattgaggtgggtataaattttgtttggataatggttagttcggatatatatgatgatgagtatatttatttgagtaattgattttatattaaattagagttttaatgtacgtatttatttttttttcgggttaaaagtcgtttatatttaattattgtacgttgcgattgttaataatatttttgtagtaaacgtggtggaaaaaatatattcggaaatatcgtaaacggaataagttttttttgaattttttataaacggaatgtgttttacggagaacgttatttcgtttttcggaattttttataatagggtgtttttttacgagaattgaatatatttttgtttttatcggggattagaaaattagcgtataaaattgaaatagatgtcgataaattacggagcgaaatantnncgtgngtataatatcgtatagcggatattatttagttatagatatttatatcgcgtagttttatacgggtgataaatttatggatttattatatattgtttttttcggttgagttatagagtcgttatttggtttgatgatttttttttttttttttttttatattgttttattttgtcgtttaggttggagtgtagtggtaagatttcggtttattgtaattttcgttttcggggtttaagtaattgttttgttttagttttttgagtagtttagattataacgtttggttaatttttgtatttttagtagagacggggttttattatgttcgttaggatagtttttattttttgatttcgtgattcgtttgtttcggttttttagtgtcgggattataggcgtgagttatcgcgtttggttaaaatatataattttaagtgtaagtttattaattttggaaagtatatatattagtataaatcgatttttttttaagatttatattattttatttatttatttatttttttgagatagttttttttttgttgtttaggttggagtgtaatggggtaatattagtttatcgtaatttttgttttttaggtttgagcgatttttttgttttagtttttcgggtggttgggattatagatatgtgttattatttttagttaattttgtatttttagtagagatagggtttttttatgttggttaggttggttttgaattttcgattttaggtgattcgttcgtttcggttttttaaagtgttgggattataggcgtgaattatcgtgtttagttaagatttatattattatgttattttagaaagtgaatttttagtttttttagttagttttttttttattataggttagtttgtttattttggaatttcgcgtatatagatgcgtgttatgttataggtatttttttgtgtttgttttgttttgtttaatattatgtttttgaaattattattattgttgtatggttttttaattttattatttttattttagatttagtatatgttgagtttaatttgttgaagggttatttttgtttaatttattattttgaaagaaatatttaaaattgagatgtttttaagaatatatagttaaattttgaggaatcgatgtagaaatgttattataagttgtttgaatttatttaggggaagttttcgtttttatttatataagagtttattggaattaatattaataattttagagaaattttatattatttatgttatttttatgatttttattttggtaattttttttttttttgagatagagtttcgttttgttatttaggttgaagtgtagtggtgcgatttcggtttattgtaatttttatttttttgattttttcgttttagttttttaagtagttgggattataggtatgtgttattatatttagttaattttttgtatttttggtagagatgggttttgttatattgtttaggttggtttttaatttttgagtataagtaatttgtttgttttggttttataaagtgttgggaggtgtgagttatttcgtttggtttgagatatatttttttaaataataatatatagatttttgaagtattggggggtatagggaaggtttttttgaagaagtattatttgaattgagatttaagtgatgaaaagaattagtttagtaaagaattagagtttttagtagagatttaggaaaaagggttgtaagtgtaagggttttgaggtagggaagtatttggtaaggagagtggtggaggtacgaggtggaaaatgtaggtaggttagtaatattcggtttattaggttttgggttggagtttttattttagttagatgaaaagtaattgatattttttgttttttaaaaaatttttatagagatgggttttcgttgtgttgtataggttggttttaaatttttgtttttaaaggattttttcgtttcggttttttaaagtattgggattataggtatgagtttttgtgtttggttgtaattgatatgttttaagtaggggaatgatatgttttagtgaaagttagtttgggtagttgggtagttaatgaggggattagagagattttgttgaatgaaaggtagattgagttttgttattcgttttttttatttttttttatttatgttttattttttcgttttttagtcgttttaattggttaaagggaagtggaggttttgttatttgtagggagggttttttggggtttgtttatagtaaataggaagttatagtttggtgagatgggtttgggaattagttattgagaaagtgggttttttgggtttttgaattttttttttgagtttttgtagtagtgaaaaagatatagaggtatatagagagtgatagagaaagagagagatagagaggagaggtatggggtagaataagaatagatttaggagttagaatttttgggtttttttaaaataattttttttttagagatagggttttgttgtgttgttcggattggagtatagtggttatttttaggtataattatggtgtattgtagttttgaatttttgggtttaagcgatttttttattttagttttttaaggatttgggattataggcgtgtattattgtgtttggtttttgtttggttttaaattgaggtagtatgatttgagtttttaggtattaattgaagttgtattttattaattgagggtttatgatgtgttggatattgggttaatagtgttgaatatattgttatttttaatttttataaataatatttgtataggattgttttttttttttttttttttttgaaatagagttttattttggtgtttaggttggagtgtagtggtgtgatttcggtttattgtaattttcgttttttggtttttagtgatttttttgttttagttttttaagtagttgggattataggtgtgcgttattatgttcggttaatttttttttttttttttgagaaggagtttatgtgtttagtattgttttagagtatttgtaattagtggtgaataatacggtttttattttaaggggtttatatttttgtgtagaaaatagaaatgaataaataaatatataagattatttttcgtggtagtgagagttgggatgaaaataaaatagcgtggtagggaggaggtaagtgttgtgagtttggagggtttttggagaatggggtttgaggcgtgattatcgtttttttttttggggggattgtttgtcgttttcgtagatatttatggttgagtgttttttaggtttttgtttgttttagtattttttgcgcgaagttgggtgtttcggagagtttgattattatgttattttttcgtttttttttttttttttttttttttatttttatggaagttaggttcgaggaatttttagtggtgaaggtggaaggtatgtttaaagggtagaaagggaagggattgaggttggaaatttgagttgtggttgggtgtttttggttgagtaatttattttttttgagtttttatttttttatttgtaaaatttaggaaagggttggaaggattttgtcggtttttttatttttagtttttggagttttttgttttataatttggtgtgaggagtcggggggtttggaggttttttttatttatgtttatatttttttttttttttttttataga

SEQ ID NO: 2404 - DNA, 8294 bp, Artificial Sequence
  chemically treated genomic DNA (Homo sapiens)
  unsure 3719, 3724..3725, 3727: n is a or g or c or t
tttgtggagagagagggagagaggtgtgggtatgggtgggggggatttttaagtttttcgattttttatattaggttatagagtagaggattttaaaagttgggagtggaggagtcggtagagtttttttaatttttttttgaattttataaataagaaaatggaggtttagagagggtaagttatttagttaaggatatttagttataatttaagtttttagttttaattttttttttttttgttttttggatatattttttatttttattattagaggtttttcgggtttgatttttatgggggtgaggaagaggaggaagaagaggaggcgaggaggtggtatggtggttagatttttcggggtatttagtttcgcgtaggggatgttggggtaggtaggggtttggagggtatttaattatgggtgtttgcgggggcggtaggtagtttttttagagaggaaggcggtggttacgttttaggttttattttttaggaattttttagatttataatatttgttttttttttgttacgttgttttatttttattttagtttttattattacgggaaatgattttgtgtgtttatttgtttatttttgttttttgtataagaatgtgagttttttggagtagagatcgtgttgtttattattaattgtaagtgttttagaataatgttgggtatatagatttttttttaaaaaaaaaaaaaaaaattagtcgggtatggtggcgtatatttgtaattttagttatttaggaggttgaggtaggagaattattggaaattaggaggcggaggttgtagtgagtcgagattatattattgtattttagtttgggtattagagtgagattttgttttaaaaaaaaaaaagaaaagaaaatagttttatataaatattgtttgtgaagattaaaaatgataatatgtttagtattattagtttagtgtttagtatattataagtttttagttaatgagatatagttttaattaatgtttaagagtttaagttatattgttttagtttaaaattaggtaaaagttaggtatagtggtatacgtttatggttttaggtttttgggaggttgaggtagaaggatcgtttgagtttaggagtttaaggttgtagtgtattatgattatgtttgggaatagttattgtgttttagttcgggtaatataataagattttgtttttaaaagaaaaattgttttaaaagaatttaggagttttaatttttaaatttgtttttattttgttttatgttttttttttttgtttttttttttttttgttattttttatgtgtttttgtgttttttttattgttgtagggatttagaaaaagaatttagggatttaagagatttatttttttagtggttgatttttaggtttattttattaggttgtgattttttgtttgttgtgggtaagttttaggggattttttttataggtggtagggtttttatttttttttggttagttgaggcggttgggaggcggaagaatgaggtatgaatgaaggggaatgaagggggcgagtagtaggatttaatttgttttttatttaataaaatttttttaatttttttattagttatttagttgtttagattggtttttattagagtatgttatttttttgtttaaaatatgttagttatagttaggtatagaggtttatgtttgtaattttaatattttaggaggtcgaggcgagaggattttttgaggataggaatttgagattagtttgtgtaatatagcgagaatttatttttatagaaattttttaaaaaataaaaaatgttagttgttttttatttagttaaaataaaaattttaatttaaggtttagtaggtcgagtgttgttgatttatttatattttttatttcgtgtttttattattttttttgttaagtgtttttttgttttagggtttttgtatttgtagtttttttttttggatttttgttgggggttttggttttttgttggattggttttttttattatttaggttttagtttaaatggtatttttttaaagaggttttttttgtgttttttagtgttttaaaaatttatatattattatttaaaaaaatatattttaggttaggcgaggtgatttatattttttagtattttgtggggttaaggtaggtagattgtttgtgtttaggagttggagattagtttgggtaatatggtaaaatttatttttattaaaaatataaaaaattagttgggtgtggtggtatatgtttgtggttttagttatttgggaggttgaggcgggaggattagggggatggaggttgtagtgagtcgagatcgtattattgtattttagtttgggtgatagagcgagattttgttttaaaaaaaaaaaaaattattaaggtggagattatgaaaatggtatgaatagtgtgggatttttttaagattgttgatattaattttagtagatttttatgtgagtgaagacgaagattttttttgagtaagtttagatagtttgtgataatatttttatatcgattttttaggatttaattatatatttttgaaaatattttaattttaaatgttttttttaagatggtgaattaaatagagatagttttttaataggttgaatttagtatatgttgagtttgaaatggaaatgatggagttagagaattatataataatggtaatgattttagaaatatggtgttgagtagaataaagtagatataaaagagtatttatggtatggtacgtatttgtatacgcgaaattttagaataagtaagttaatttatgataagaaagagattggttgggaagattgagagtttattttttggggtgatataatagtgtagattttggttgggtacggtggtttacgtttgtaattttaatattttgggaggtcgaggcgggcggattatttgaggtcgggagtttaaaattagtttgattaatatggagaaattttatttttattaaaaatataaaattagttgggagtggtggtatatgtttgtaattttagttattcgggaggttgaggtaggagaatcgtttaaatttgggaagtagaggttgcggtgagttgatattgttttattgtattttagtttgggtaataagggagaaattgttttaaaaaaataaataaataaataaaataatgtagattttgaaagggggtcggtttatgttggtgtatgtattttttaaagttagtaaatttatatttaaggttatatattttggttaggcgcggtggtttacgtttgtaatttcggtattgggaggtcgaggtaggcggattacgaggttaagagatggagattattttggcgaatatggtgaaatttcgtttttattaaaaatataaaaattagttaggcgttgtaatttgagttatttaggaggttgaggtaggataattgtttgaatttcggaagcggaggttgtagtgagtcgagattttgttattgtattttagtttgggcgatagagtgagataatgtaaaaaaaaaaaaaaaaaaaagttattaaattagatgacggttttatagtttaatcgggaagggtagtatgtagtgagtttatgaatttgttattcgtatagaattgcgcgatgtgagtatttgtggttgaatgatattcgttgtacgatattatatntacgnngntatttcgtttcgtgatttatcgatatttgttttagttttatacgttaattttttggttttcgataggaataggggtgtgtttaattttcgtaaaggaatattttgttgtgaggggtttcgagaggcgaaatggcgtttttcgtaaagtatatttcgtttatgaaaaatttaaaaaaggtttgtttcgtttacgatattttcgggtatattttttttattacgtttattgtaggagtgttgttgataatcgtaacgtataatagttaaatatggacggtttttgattcgaaaggagagtagatgcgtgtattaagattttggtttaatgtagagttagttgtttaagtaagtgtatttattattatgtatgttcggattgattattgtttaagtaaggtttatatttattttaatttttattgtagatgtaaatagtagttattttgttttcgggatgtaattgtgtaatgttcgtaatagtgtttattgtataaagaggttgttgtaagttgttttttttttattgtatgtaatttgtttttgacgtgggatagaatgaagcggggttttttgtgttgttttaacgttgtttgttggttaagagttaacgtgatttgtttgtgagaggagtttttttcggaagaattagggtagtttttgtttttagagggttaatgttttagttgagtgtagtttttcggttttagtatggtttagttttgggaagagggtgtttagttgtgtaatttcgggtcggggtagtcgtgttttgattttggtatttagggttgagtttggagggggtttgtgatgtttgattttgtttttttttttggttttatgttttggtagttgtgaggcgttattgttttgggtgatttgatttggttgtgatggatgagtacgggggaaatagtggaagattcggaattagaagacgtgagtgggttttggttttagtttttttattttattttttgttttgggttgtttgtgattaattttgtttttgtaggtatattggatagttttgttggagtttagtgtttttaattttttttagatattggtggtttaggggaggttattaaagatcggtgggatatcgattttagttcgtttttacgtttttttttgttttgttttgtttttttgagatcgagttttatttttgttgtttaggttggagtgtaatggcgtgattttggtttatcgtaattttcgtttttcgggtttaagcgatttttttgttttagttttttaagtagttgggattataggcgtgtgttattaggtttgattaattttttatttttagtagagataaggtttttttatgttggttaggttggttttaaattttcgattttaggtggtttgtttgtttcggttttttaaagtgttgggattataggagtgagttatcgtgttaggttttttttaggtttttggtattttagttagaaataatttaaggataagtgtaaaagttatgaacgtaggtagattttttgtagagtaaagggatttattgaagaagaggaacgtgggggtttttaagagagtgttttatgttttataaggtgtggggttgatttttatgggtttttttaattaaagaggggtatatttatgaagattttaggaaaaggtaaagattttttaagatcgtggtgttataatttatatttaaatataggtgtttttggagtcgttttggtattggtgggtgtacggttttatatgttattgattgtatagtgagattttaggtgaaatttatattaaatatagcgttatgttgtgtttggttggtcgtagttagtttggtttttattttattttttagggatttattggtttttagcgtatgtagttattttaagttttttttttttttttatgtgaaattgttgtttgggattttgtatttatttgttattattttattaattttatattttcgttttttttttgtgttatttcgtgtgggttcgataggttgttattagagtgtaatataaagttttagttaagggaattttttgagggttgttgagggtaggggtggagttagtagtttgaggatttgttagttacggggattttttatgggtatagaggagggaggaggggtttatggttttagtatatgagaagttttttttttgtttggaatttttatgttttagttttttttatatttttatttgttcgtttgtttttgaatttacgtattttttggaagttttgggagatttatttttatttagatggttgtttatttgtttcgtgtatagtttgattttggattttaaagtgaggataaagaacgaggaggatggggggatgttttttttttacggggttttgtggtttttaaatttcggttttttttggttttttgtttgtggagttttttttaaatttagggaaataaaattatttgttacgggttgtggtttttttaggattttttattaatgttttttgaggtttttaggagttatgaagttggggttgatttttagggtaatgggattgtagtgtttttgtttttttttgttttatgtatttatgttttgttttatttttgtttttttattttgtttatatatatttttttagattggttttgtggttagagtttggagtgtatgggttgttgggggtttgtgggttgtattgggttagaatttttggtatttttaagattggtttggagttagtaggtaggtgatttttttagggtttgtttattttagtttttttttttaatttttttttttttttgtttgggttaattagagagagtttgtttgttggttgtttggtagggtggagtttaggggtaggttaggagtttagtgatagttcggaaaaaaaaaaaaaaaaaaaaaaaaaatagaaaaaaaaaatttataaaaataaatttattattgggtttttttttttttatttttttgttttttatatagtaaatttagtcgtggttttggagattattttaagtttgtttttagttggtatattaaggagggtaatggagaagtttttttatttttaattttatttttttttttcggaagtaaatttaagtttagtttcggttttagattttttttatagtggatttaggaaatttttagtttagagaataattttgtattttttatataatatttataattagttattgcgggcgaggagggtacgaggttaggtttttaagagtttaggtgagtgatatagtggaacggtttagggcgtttttattttgtttagtttgtggttttaatattttagaagttgaggtttttggtatttttgttttttttttatggatattttattttagataattttggtttgcgtgaatttttttttttttttttgtttgtttgttttttttttcggggaggttaggttttgttgttatttaggttggagtgttgtgggattttggttattgtagttttgaatttttgggtttaagtgatttttttgttttagtttttggagtagttaggattataggtttttattattttgtttggttaatgtttaagaatttttttaaagatttttagagatggggttttgtaatgttgtattaggttggtttttaatttttggttttagtttttttagggtttgggattataggtgggagttattttgtttaggtttgtgtttttgttgagttattagagttttgtttatttttatagtagttttggtttttagtagtagtttagttttttaatgggtcgtgtttgttttggagtttagatggattgtggttaggtaagtggattataggtttggttggtttgggcggtttttatatgtgaggggttgaggggtttaaggaggggagtatttttattgggtggaggttgggggttttagtaggaagtggtgagataaagggcgttggttggtagggagatagtataggaaggttttagagtttttttagtgtagttggatttttttggagatttttatatattttgatatttgggttttgttcgacgagggtgtttttattggtttgtattatggtttaggttttgggattttgaatagtttcgtaggtgaatgaaaggtgaggttaggttggggaattatcgtattagagttcgatttggtttttagttttagtttcgttattgagtggttttgtgagtgcgggtaagttatttagtttttttaggttttagtgatttttttgaaagtaagaattttatttttttgttgttgtgatggtggtaagggaacgggtttggttttggtttttgacgtaggaatatggagttgatttaggatatttttcgttcgttattggagtacgtgaagggggtttcgtttattaagtattttgtagaggtattggggtttttgtagagtttttaggttcggtttgatgatttgtttattagtatttattttaagttcggtaagtgaggagggttatttatttttttttaggtggtagtttttattttggttagcgaggtcgtgtttttagtttgtttattttttatttttttttttttttagg

SEQ ID NO: 2405 - DNA, 10151 bp, Artificial Sequence
  chemically treated genomic DNA (Homo sapiens)
  unsure 600, 657: n is a or g or c or t
tttttttatttgaggttaggttaatttttttgatattagttaaggattcgtttttatattttttaggtatcgttttgttttgttttaatttttattttttgtagtatttgattacgtggtatttatagttatttaaagtaggatgtaaataggaatgttttgagagatttgattatagtttttaaatttttaagtttatgatttgtagtatttgtttacgaggatcgatgtgttttttggttttaatggggagttattggattttttattttaggaaggtgtttaatagttgttgtggatggttttattgtttaggtttagaattagttagaagggaatttttttttttattattattttttatgtgtttaagtttagttgattgggtgtttttatttatgtatttttttatttagtgatttttgttgttgtttttagttaggaatttttttttttttatattgaaatgttaatattagaatttgggtttagtttttgtagtagaatggtttttgtatagttagattagttttgtttagaaaaagggtttttattttttttttttttagagtttagattaattttttaggaatttgttgngtttggagaaaatttttagatagtagggttgtttaattttgttttgttttttgtggngggttatatatagatttttattatatttttatttttttaagtttgttttttatttttaattttagtattgtttatatagttttgttattatgttaaatgattatggttatttatttatgggtttttgggatgcgtattttgtttttgttaaattggggattgtgagggttttagatatgtggtgcgttttggcgggggtttattgttggggatggaggaaggatcgatggaggcgcgacgcgagtggttgggttgggttttttggttgtttcgggggggcgttggggattggtgggtggggtggggggcgggtggggttgggggagggcggcgcggatatttttttttttgttattatgtgaagaaggatgcgtttgtttttttttttattatgattttaaattttttgtggtttttttagttatgaggaattgtgagttaattaaattttttttttgtataaattgtttagttttgggtagttttttataagaatatgagaatggattaatataggtttaattttggttattttttaattttttaagttattggagttgattttttgggtagttttaatatgattattttttttattttttagttattagggtatattaggttttatgaattattgattttaatttttgggttggaggataggaaaatttttagtagaggttaattggagatattcgtttttttttaggatttttagaattattttaatattttgaaatgttttatttttagatattgggtaatgaatgttaagtataaaatattattgggtattgtggttaattaggaataatagagtagaagattatgatttattttagtttattttaaaatttatattttattgtatttagggttgggtttagaaaggggattattatttaattttagtaagttttaaaaaatagttgttttgattttatgtgaaattataggttattgattatattgtataatttatatttgggtttattgaatgatggtttaagataatttgtaaatttgatattatagtgagttatttaatgtttaatgtaattttttaaggtgatgaaattaattatttaggtagtagaataagttattgttatgtagtataaataattgtttattaattttttataattatttttgtgatattaagtagttttattaatagttttttttatataattttattttattatatattgatttttattatgagatatgatttttttgtggtgaatttatgttaaggtatttatttgagttttttgttgagaattaaattaattttattttttaaaggtcgattttttttaggaatggagaatttaggtttttttatttataattattagattttgttatttataaaattataaagaaagtttaagtatattttgggaatatatatatatttttatgtattatatataatatgtttttgaataatatcgtttttttttaacgttgatgagaaaaataattaatttttggttagggttatcgtttgtgtggagtttgtatgttttttttatgtttgtatggggtttttttaggtattttagtttttttttatattttaaagatatgtatattattttttttaaatgtatgtatagtttatatttattttagtgttttttattagaagtgtttttggtttttatttagaagtttggtgatgtttttgtgattagtaatatgttttaggaatttaatttttgtgtatatttagtagtttatggtaaaattggttttgttttatattgttttatttaaagttatagtttttaagaatttatagatgatattgaggattatttatgtgtatagatatgatggatattttgatatttagtggattttttttaaaaaattgaatttaaaagttttattaaaatttatatttattatttattatttaaatttaattatttttttttttggtattatttaatttatatttaatatttagttttaattatttgtaattgtgtatgatatagtaaagattttggggaggttaagatgggtagattacgaggttaggagatcgagattattttggttaatacggtgaaattttatttttattaaaaatataaaaaattagttaggtgtggtggtaggcgtttgtagttttagttatttaggaggttgaggtagaagaatggtgtgaattcgggaggcggagtttgtagtgagcgtagatcgtattattgtattttagtttgggcgatagagtaagatttttttttaaaaaaaaaaaaaaaaaaagattttgagttaaagtgtttaagttgaatgtattttgttatttataagataaatcgtgttaattttttgtggtttattttatttataaaatagagataataatagtttttgtttttagggttgttgtgggaattaaagatttagaataatgtttagtttttaattagtgttgttataattgtttgatataattgtattatatttgtgtattttgtagattgatattaaattatatttttaaaaataggtgtttaatgttttatttaattattttaaaatatgtttaattatgtttttattttatttttataatatttttataaaaattttttatatatagcgtttatttttggtttagttttttaggaaaataattttgagagttagttatttgaattaaagaaatattaatattattagattatattgggatttttgagattggtttttattaattttttagttacgggtttttgttattatttttattagtgatttaagtgttaaatttaaatgttttgtatttgttttattaaagagatgtagtatttgttttttttttattgtttttattttttttgttatgtttttttttataattataaatatttaggttttttaggttttaaacggggtattttttaatttttatatttttttttttggttatttttttttttttaatagtttaatttatttagatttttacgtttgaaattattttagatgttttagaggcgttttattattataatggtatattattttttatttttttatatgttacgttagtttttaaattgaaaatttgagcgtttatttttggtgtattatttttaaattttagatttttaaaatttagggttatgtaattttaaaaaatttttatttttttttttttattgtttttgtttaggttttattttttttagtagttgttttaaaggtttattttgtttttttttcggagtgttaatttttatcgaagtttttatttagttgttaattttgttttatgtttgataatttgttcgtgcgttgatatatataaaatttttaagataaaaattttttaataatggtaaatgaattttgggaattgtatatagattatatagatttataataagagaaaaggttttagattaatacggaaaattttttatttaattaatatttgtattggtaaattttattaagtaagattttatttaattttatattattttttattgaagaggttgtggttattttttggaaatatttgaatttatttttataagttagagaaatagcgttattcgaaatattattttttgggttcgagttttaaggtatttgataaacggagcgttgtgggtaggggtgaggtgttttttttagggttgggattttgttttgggcgagggcgtcgtagggtaaagattttatcgggtagtagaattcgggtagaaattagtaattgggtttttcgcgtagtagaaaaggggaatttagtcggggtttattttttttgttagcgtagatcgtaagtttggttttattttttcgtcgggagtcggtttggcgcgtttcgtttaggtatttcgatcgtgggtagtttgcgttcgtttgggttttatcgtttcggttcggtagatatttgagcggtggttagggtaggttttcgtttttgtcgatgtttatgttttgggatatagcgacgatgtagtttagcgaattaattatgatagtagcgggaggattttcgagttcgttcgttatagtagaacgcgcggttaagtttggcgcgaaattgtggtcgtttcgttttttcgtttttatttgtgtaggcgaggtttcgttttttcgtttcggcgtacgtagggtcgcggcgtgttcgcgttcgtagacgtttgggaattgcggtcgcgggttcgcgtttttcgtcgggttttgtcgtcgggttgttatttttgttttgttatgtttcgtcggaagtttgcgtcgggcggtttcgttgtttttagtttagtttttgcgaggtaagcggttttgagtcgatttttttagtttacgggaagtttgaaatttatttttttttttataggtgtagtcgattaggtggattttggcgttgtagcggtcgtagcgtttttagcgttcgttttttcgttttagttgtcgtcgtacgtagtaggttttgtttgggattgggtagggttatcggggttgggggggcggggtttgtgggtaaggcgggcggaggcgtggatttttcgttcgatgatagggttggaggaggaaggggcgggttgaagaaggggaaggtgggaagagtttagtcggggttataaattgggtgaagcgttgaggttttagtattttcgtttgaggagataggtaaaggttatgtaggtttttaatggtaggtttgagataggaatttaggttttttgatttttattttgatgagggggtttgtgggtaaggggtgcgttttttaatttttattttttttttttttttttggtggtcgaagagttttattgattttttaaaaaagtgttggattgggtgattagaagaaagttgtttttaggtttttagtttttaagattgtaatagtatggtttaatatttgaaattattacggttaaaagtagttatattgtgtagttttttagtgaatattttttgtagtttagattataaagtttgaaatatagtttgggtggataaagttttttaggatggtatagatgtgattaattatggagttttttttgttgtcgttttttaacgtaataagtacgtttgtttgtttttaaattagagatattgttataggaaaagtttaagggtgattttttatttgggttatttgtatagtattttttagattgaggttgtggaagggtattgaagattggtgtttagttatttatcgtgttttaatgtaggtggtagtttgggtgttttaaaattttgtttttttcgtatatattttttttttaaaatgattattttttttttgttttttttgaggacgagttacgtttttatgaatttattaaaattttgtatttattatttaaagggtagttggtgaaggatttatgtatgtttttggtaagttttttgttaagaaaaaatttataattttgttatatttttagtgatgaatataaattttttaaataggaaatatttaaattgtaatgaatatgttaaaaatgatattgtttttttattatttatttttttttttttgtgtttttgttatataattgtttattttttagaggtattttatttagtatatgtaagtagggtgatttaagttttataattagagaaagttgaaggtttattgaattaagatcggtagtagttttggttttaattaattttaaatacggtttgagttgttgaggtttttgattattagattttattttgttttttatggtgttaaaaatagtttatttatagggttttttagagttaaaagtagaggattttttgaagagtggatggtaaggaattttgttatttagttgtaaagtttaaattggtttatatacgttaggtttttttagagtagagataatatattattttttaattttttcgatataggttatagaaattgatagaagaaagaagagattattggaaaatgatgggtttgttaaaaagaaagtaaagaaagtttaataaaaggaaggaggaagtgatttgggaatgtttggtaattttggtgagttgtgggggatttttttttttttttagttatggttttggtattttggaattttttagagggtagaagagtttattagaattgtgttttttttttttgtggagaaaggttttttttgtttttgagtagagtggttttttataggtgatggtgatgtgtataggaggttaaggggatggtagagttagaattttgtaatttagttgtagtttttttaatttttttttttattttttttagttatttttgttttggttataaaattaaaatatttttgttatagaaattttaaatagtatagaaatgtggaaggtaggtagtgatagattttataatttttttttttgagtgaggtttattgttattggtgttttgtatatatttttagattttaaaaattgtatatgtgtatatgtgtatagttataagtttaaaaattagtttaaatatattttatagattatattatattttatattaatttgttattatttttttttattattaatagaattttttattaagaaaattttgaataatttttagtattaggatttgtagatttatttttttcgtttttttttgtttagagttgttttttgtgtatgtaaaaggtattgaataaaaatagtatgtttaggttgggcgtaggggtttatatttgtaattttagtattttgggaggttaaggtaggtggattatttgaggttaggagtttaagattagtttggttaatatggtgaaattttatttttattaaaaatataaaaattagttgggcgtgttggtagttgtttgtaattttagttatttgggaggttgaggtaggagaattatttgagtttaggaggcggaggttgtagtgagttaagattgtgttattgtattttattttgggtaataaagcgagattttgttttaaaataaaaaataaataaaaaatagtataaaaataaataaaaatttagtttgtttgagtgtttgagtttttggatttttagaggtggtgttgtatatagatagttgagtagatttttttttagttttatggtattagagaatttgtgataagggaagataggaaatttatttttatttattatttttaggaaattaggtaaagagaatgagaaaaaaaaaagttttaatttagatagaggtatttgtttaatggagatatatgtaaaatattaatttttttataaaaggtaaaatttgaattttagggttaatatgaaagcgttagtatgaaataattataggaatggagatgtgtggttaaggagaaaagtaaatttaaaattttatttttttggaggggttatgtaaggaggcgtgatttgagagaatttgttacggttaatgttataattttggggtagtttattttttattgtttgattattttgtatagatttattttttaggtttataagtattgaatgagtatttttgatttttattttagaggttttttgtagtttatttattttttttaagaatgttttttgttttttttttttttttttttttgagatagggtttttcgttttgttatttaggttggagtgtatttgtgtaattttagtttattgtaattttttgggtttaatttttgtttattgtaattttttgggtttaagtaatttttttgttttagtttttcgaatagttgggattataggtgcgtgttattatatttggttaatttttgtatttttagtagagttagagttttgtatgttggttaggttggttttgaatttttggttttaagtgatttgttcgttttggttttttaaagtgttgggattataggcgtgagttattgtattcggtttgttgttttttttttatagaggaagaagtgggtgatagatgaagagaattgatgattattatagttaagtaatttaattaagattatatggggatagttgagatggaatgttgttgaaataagataatatatttggtatattttaaaataggatttttgttatttgttaaaaatggtattaaggaagaagggggaggattatttattagttagaagttgggtgattgttttattttagtttattttattttttagagataggttttattttgttatttaggttggagtgtagtggtagggttattgtttatgtagttttaaatttttgggtttaagttatttttttgttttagttttttagtagtaaggattataggtgtatgttattatgtttggttaattaaaaatatatatatattttttagagatagggttttgttgtgttgattagattggttttgaatttttggttttaagttatttttttgttttagttttttagtagttgggattgtgtttttgagttattatatttggtaagttttttgtttttgtttttttttaataatagaattattaagatatagtttttggggttaggtacggtggtttatgtttgtaattttagtattttgggaggttaaggtaggtgtattatttgaggttaggagttcgagattagtttggtttatatggtgaaattttgtttttgttaaaaatataaaaattagtcggatgtggtggcgggcgttagtggttttagttatttaggaggttgaggcgggagaattttttgagtttggaaggtggaggttgtagtgagtcgagatcgtgttattgtattttaagttgggtgacggagtgagattttgttttaaaaaaaaaaaaaagatatagttatataatatgatttatttatttagtatgtataattcggtggtttttaggatatttttagagttgtgtaattattattaaagttaattttagaatatttttattattttaaaagaaattttgtgtttattaatagttattttttagttttgttttagtattttttagttttaggtaattattaatttattttttgtgtatagatttgtttattttgaatattttatataaatggaattatataatatgtggtttttggtgtttggttttttgtagttattgtaatgttttttaaggtttattcgtgttgtagtatgtattagtattttatttttttttttaaaaatatttattttttttattgtggtaaaatatatataatataaaatttattattttagatatttttaagtatatagtttaggggtatttagtatatttatattgttatgtatttattattattatttatttttagaatttattttattttgtatttttataattttgtatttattaaatattgatttattgtaattttttttttttagtttttggcgtttattatttagttttttgtttttattattttggttattttataatgtatttatttttttttatttttaggtagtattttattgtatatatttattttagtttttaattttttaattaataagttattttttatatttgggatttacgggggaaggaaattttta

SEQ ID NO: 2406 - DNA, 10151 bp, Artificial Sequence
  chemically treated genomic DNA (Homo sapiens)
  unsure 9495, 9552: n is a or g or c or t
taaaagtttttttttttcgtggattttaggtataaaaaataatttgttaattgaagagttaagaattgaggtggatatatataatggaatattgtttggaaataaaaaggaatgaatgtattatagagtagttaaaatgatagagatagaaagttgaatggtaggcgttaggggttgggggaagggggttatagtgagttagtgtttaatgggtatagagttataggaatgtaagataaaatgagttttggagatggatggtggtggtgggtgtataataatataaatgtattaaatatttttgggttgtatatttaaaaatgtttaggatgataaattttatgttatgtatattttattataataaagaaaatgaatatttttagaaaagggaatgaagtattgatatatgttataatacggatgagttttgaaaaatattatagtaattgtaagaaattagatattaaaggttatatattgtatgattttatttatatgaaatgtttagaataggtaaatttatatatagaaagtagattagtggttatttagggttggggagtgttggggtagaattaggaggtggttgttaatgggtatagggttttttttggggtgatgaaaatgttttaaaattgattttgatgatggttgtataattttgggaatattttaaaagttatcgaattgtgtatgttaaatgggtgaattatattgtataattgtattttttttttttttttgagatagaattttatttcgttatttagtttggagtgtagtggtacgatttcggtttattataatttttattttttagatttaagggattttttcgttttagttttttgagtagttgggattattggcgttcgttattatattcggttaatttttgtatttttagtagagatagggttttattatgtgggttaggttggtttcgaatttttgattttaggtgatatatttgttttggttttttaaagtgttgggattataggtatgagttatcgtgtttggttttaagaattatattttaataattttgttattagaaaaaaataaaaataaaaaatttgttaggtatgatggtttaggagtatagttttagttattgaagggttgaggtaggaggatggtttgggattaggaatttaagattaatttggttaatatagtaaaattttgtttttaaaaaatatatatatatttttaattagttaggtatggtggtatgtatttgtggtttttgttattaggaagttaaggtaggaggatggtttgagtttaggagtttgaggttatatgagtaatgattttgttattatattttagtttggatgatagagtaagatttgtttttaaaaaataaaataaattgaagtggaatagttatttagtttttgattagtgaatgattttttttttttttttttagtgttatttttaataagtggtaaaggttttattttaaaatatgttaagtgtgttgttttattttaataatattttattttaattgtttttatgtggttttagttaagttatttaattgtgataattattaattttttttatttattatttatttttttttttataaaaagagaataataggtcgggtgtagtggtttacgtttgtaattttagtattttgggaggttaaggcgggtagattatttgaggttaggagtttaagattagtttagttaatatgtaaaattttgattttattaaaaatataaaaattagttaggtgtggtggtacgtatttgtaattttagttattcgggaggttgaggtaggagaattgtttgaatttaggaggttatagtgagtagagattgaatttaggaggttatagtgagttgagattgtataagtgtattttagtttgggtgatagagcgagagattttattttaaaaaaaaaaaaaaaaaaggggtaaaaagtatttttaggaaaaataaatgagttataaaaagtttttagaataaaaattagaggtgtttatttagtgtttgtagatttaaaaaatgggtttatgtagaataattaagtaatgaaaggtaggttgttttagaattgtaatattaatcgtggtaaatttttttaagttacgtttttttgtatgatttttttagaaaggtgaagttttagatttatttttttttttagttatatatttttatttttgtagttattttatattaacgtttttatgttgattttaaaatttaaattttattttttatggaaggattaatattttatatatatttttattggatagatatttttatttgaattgggattttttttttttttattttttttatttaattttttgaggataatgaataaagatggattttttgtttttttttattataaattttttgatattataaaattagagaaaaatttgtttaattgtttatatgtaatattatttttagaaatttaggaatttaggtatttaggtaggttgggtttttatttatttttgtgttgttttttgtttgttttttgttttgagatagagtttcgttttgttgtttagggtggagtgtagtggtataattttggtttattgtaattttcgttttttgggtttaagtgatttttttgttttaattttttaagtagttgggattataggtaattattagtacgtttaattaatttttgtatttttagtggagatgggattttattatgttggttaggttggttttaaatttttgattttaggtgatttatttgttttggttttttaaagtgttgagattataggtgtgagtttttgcgtttagtttaggtatgttgtttttatttaatgttttttatatatataaagagtagttttaagtaaaaaaaagcggggagagtagatttgtaggttttgatattgaaaattgtttaaaatttttttaatagaaaattttattaatagtagaaaaagatagtagtaaattagtataaaatataatataatttgtgaaatatatttaaattaatttttgagtttatgattatgtatatatatatatgtataatttttaaaatttggaagtatatatagaatattaatagtagtgggttttatttaaagggagggattatggggtttattattgtttattttttatatttttgtattgtttgaaatttttgtagtaagaatgttttaattttataattaggataaaaatagttagaaggaataaaggagaaagttgggagaattatagttaaattgtagaattttagttttattatttttttaattttttatatatattattattatttatagggggttattttgtttaggaataaaagggatttttttttataaagaaaaaagatataattttaataggtttttttgttttttggagaattttagaatattagggttatgattgaggagaaaaaagaattttttataatttattagagttgttagatatttttagattattttttttttttttttgttggattttttttattttttttttaataggtttattattttttaatggtttttttttttttttgttaatttttgtagtttatatcgggaaggttagaaaatgatgtgttatttttattttgagaaggtttgacgtatgtgaattaatttaaattttataattgaatgataaggttttttgttatttattttttaaagaattttttatttttagttttggaaaattttatgggtgaattgtttttaatattataaaagataaggtagagtttgatagttaggagttttagtaatttaagtcgtgtttagaattaattgaaattaaggttgttatcggttttgatttaatgagtttttagttttttttaattataaaatttgaattattttatttatatatgttaaataaaatatttttaagaaataaatagttatgtagtaaaggtatagaggggaaaagataggtaataaaagaatagtattatttttgatatgtttattgtaatttaagtgttttttgtttaaaaggtttatgtttattattaaagatgtgataagattatgaatttttttttggtagaaaatttgttaaaagtatatataagttttttattagttattttttaaatggtgggtgtaaaattttggtgaatttatgaaaacgtagttcgtttttaaaaaaaatagaagaggagtaattattttaagggagaaatatatacgaaaggaataagattttgaagtatttaagttgttatttatattaaaatacggtaggtggttaaatattagtttttaatgtttttttatagttttagtttgaaaaatattgtgtaggtgatttaagtgaggggttatttttgggttttttttgtggtagtatttttggtttaaaaataaataaacgtatttattgcgttgaaggacggtaataggaaggattttatgattagttatatttatattattttaagaaattttatttatttaaattgtattttagattttataatttaaattataaaaagtgtttattggggaattgtataatatgattgtttttaatcgtagtgattttaaatattgagttatgttgttgtagttttaaaaattggagatttaagggtagtttttttttagttatttaatttagtatttttttaaaaaattagtaaaatttttcgattattaaggaaaaaaaaaaaggatggaggttaaaagacgtattttttgtttataagtttttttattagaatgggagttaggagatttgagtttttgttttaggtttgttattaaaaatttgtataatttttgtttatttttttaaacggaagtattaaaattttagcgttttatttaatttgtagtttcggttgggttttttttattttttttttttttagttcgttttttttttttttagttttattatcgggcggagggtttacgttttcgttcgttttatttataagtttcgtttttttagtttcgatggttttgtttagttttagatagaatttattacgtgcggcggtagttggggcgggaaggcgggcgttgggggcgttgcggtcgttgtagcgttagggtttatttggtcggttgtatttgtggaggaggaggtggattttaggtttttcgtagattggaagaatcggtttaaaatcgtttgtttcgtaggggttgagttggaggtagcgaggtcgttcgacgtaggttttcggcgagatatggtagggtaaggatggtagttcggcggtagggttcggcgaggagcgcgaattcgcggtcgtagtttttaggcgtttgcgggcgcgagtacgtcgcgattttgcgtgcgtcggggcgggggggcggggtttcgtttgtataaatagggacgagggggcggggcggttataatttcgcgttaaatttgatcgcgcgttttgttgtaacgagcgggttcggaggttttttcgttgttgttatggttggttcgttaaattgtatcgtcgttgtgttttagaatatgggtatcggtaagaacggggatttgttttggttatcgtttaggtatttgtcgggtcggggcgatgggatttaaacgggcgtaggttgtttacggtcggggtatttgggcgggacgcgttaggtcgattttcggcgagaggatggggttagatttgcggtttgcgttggtaggaagggtgggtttcgattggattttttttttttgttgcgcgggaggtttagttgttgatttttgttcggattttgttgttcggtgaggtttttgttttgcggcgttttcgtttagggtaaagttttagttttggagaaaatattttatttttatttatagcgtttcgtttgttaggtgttttagagttcgagtttaagggataatgtttcgagtaacgttgtttttttaatttgtaggaatgaatttagatatttttagagaatgattataatttttttagtagaaggtaatgtgggattaagtagggttttgtttgatgaagtttattagtgtaaatgttagttaaatggaaagtttttcgtgttaatttgggatttttttttttattatggatttgtatgatttgtatgtagtttttaaggtttatttattattattaaaaaatttttgttttagaaattttatgtatgttaacgtacgagtaaattattaggtatggggtagaattggtaattgggtggaggtttcggtggaggttagtatttcgaaaggaaaatagagtaggtttttggaatagttgttggaagagataaggtttgaataagggtagtggagaagagagggtaaaaattttttaaggttatatgattttggattttggagatttggaatttaaaggtgatgtattagggatgaacgtttagatttttagtttgaaagttggcgtgatatgtaaaggagtggagaataatgtattattgtaatgatgaggcgtttttaggatatttaggataattttaggcgtggggatttaggtgaattgaattgttggagggaagggaataattaaggaaaagaatgtgggggttgagagatgtttcgtttaaaatttaagagatttggatatttatggttgtaagaggaggtatggtagaggaaatggaaatagtaagaaaggagtagatgttgtatttttttaatgggatagatataaggtatttgggtttgatatttaggttattggtagagatgatgataagagttcgtagttaaagaattgataaaagttagttttaaaaattttaatatagtttggtaatgttaatgtttttttggtttagatagttgatttttaaagttatttttttaagaaattgaattaaaagtggacgttatatgtaaaaagtttttatagaagtgttataagagtaggatagagatataattaaatatgttttaaggtaattgagtggaatattaagtatttatttttaaaagtatgatttaatattaatttataaagtatataaatataatataattgtattagatagttgtgatagtattgattagaggttgaatattattttaagtttttaatttttataataattttagaagtaggaattattgttatttttattttatagataaagtaaattataaggggttaatacgatttgttttgtggatgataaaatgtatttaatttgagtattttgatttagaatttttttttttttttttttttaagagggagttttgttttgtcgtttaggttggagtgtagtggtgcgatttacgtttattgtaagtttcgtttttcgggtttatattatttttttgttttagttttttgagtagttgggattatagacgtttgttattatatttggttaattttttgtatttttagtagagatggggttttatcgtgttagttaggatggtttcgattttttgatttcgtgatttgtttattttggtttttttagaatttttattatgttatatataattgtaaatgattaaaattaaatattggatataaattggataatgttaaagggaaaaatagttagatttaggtaatgagtgataagtatgaattttggtaagatttttaagtttagttttttaaaggagatttattaaatgttaggatgtttattatatttatgtatatagatagtttttaatgttatttgtgagtttttggaaattgtgattttaagtgaaataatgtagagtaaaattaattttattataggttattggatgtatataagagttaagtttttagggtatattgttggttataaaaatattattaaatttttaaatgaaggttaaaaatatttttaatagaaaatattgaagtaaatatgagttatatatatatttaagaagaataatgtgtatgtttttgggatgtggaaggaaattggaatatttggagaaattttatgtagatatgggaaaagtatgtagattttatatagacggtggttttggttaggaattgattattttttttattaacgttagaagaaaacgatgttatttaaggatatgttgtatataatatatgaaaatatatgtatatttttaaaatatatttaggttttttttgtgattttataggtaatagaatttggtgattatgggtaagaagatttgggttttttatttttgagaagaatcgatttttaaagggtagaattaatttagtttttagtagagaatttaagtaagtattttaatataaatttattataagaaaattatgttttatagtggagattagtatatgataaaatgaaattgtataaaaggagttattgatgaagttgtttaatattataaaggtgattatagaaaattaataagtagttatttatattatatgataataatttattttattatttgagtaattgattttattattttgaaaagttatattaaatattaaatagtttattgtggtattagatttgtaagttattttgaattattatttagtaggtttaaatataaattatatagtgtaattaataatttgtagttttatataaagttaaaataattattttttgggatttgttaaaattaagtgatgattttttttttggatttaattttaaatgtaataaaatgtgaattttaggatgggttgaaatgggttataattttttattttgttatttttagttaattataatatttaataatattttgtatttaatatttattatttagtgtttgaaggtaaaatattttaaagtattgaaatggttttagagattttggagagaagcgggtatttttagttagtttttgttaagaatttttttgttttttaatttaggggttggagttagtagtttatgaagtttgatatgttttggtgattggagagtgggaggggtaattatattaagattgtttaggaagttaattttaatggtttgggaggttgaggggtggttagaattggatttgtgttaatttatttttatgtttttataaagaattgtttaagattgggtaatttgtataggaaagaggtttaattgatttatagttttttatggttggggaggttataggaaatttaaaattatggtggaaggggaagtaaacgtatttttttttatatggtggtaggaaggaaagtgttcgcgtcgtttttttttaattttattcgttttttattttatttattaatttttaacgttttttcgaggtaattagggggtttaatttagttattcgcgtcgcgtttttatcgattttttttttatttttaataataagttttcgttaggacgtattatatgtttaaagtttttatagtttttagtttagtaagggtagagtacgtattttagaaatttataaatagatgattatgattatttaatatagtagtaaggttatgtagataatattggaattgagagtgaaaagtagatttagaaggatggaagtgtggtggagatttatgtataatttnttatagagagtaaagtaaggttaagtaattttattatttggaagttttttttaaatntaatagatttttaaagagttagtttgagttttgagaaagaaaaaagtaagaattttttttttaaatagggttggtttgattgtataaaagttattttattataaagattaaatttaggttttgatgttggtattttagtgtgaggaaagaaagatttttggttggaagtagtagtaaaggttattaaatgagagagtgtatgggtgggaatatttagttaattgggtttgaatatatagaagatggtggtgagagggaaaatttttttttgattagttttaggtttggataatgggattatttatagtagttgttgggtatttttttaaggtggagaatttaatagttttttattgaagttaaaagatatatcgattttcgtgggtaggtgttgtaagttataagtttaggaatttgggggttatggttaagttttttaaggtatttttatttgtattttattttaggtaattgtgggtgttacgtggttaaatattgtaggggatgggggttggagtaaagtagggcgatgtttgggaagtgtaaaaacgaatttttggttagtgttaagggagttggtttggttttaggtgaaagag

SEQ ID NO: 2407 - DNA, 14353 bp, Artificial Sequence
  chemically treated genomic DNA (Homo sapiens)
taggggattttgaaggtttattagatgtggttgtagatttattttttttagatttttagttttggatttaggttggttttttgtcgtggagtataggcgttttttgtagtatttattttagttgtttagggaatcggggatttggtgtggattgagatttagtttttttgaagttttattttgtttatcgttgtaagatataggcggttttaagtaggattaggtcgtattttttaggtagagatagttgttgtgggttttgtgtttttttaatgggtatgtttttttatcggtgatgaggattgatttgtgtagtgatttttttatatttttttgaaaaggagattaaggaaaatattttttagtagaatttttattgtgtatatatttttttttgtgttcggtgatagttattgtttttgggagtagggaggacgttttagaattttttggttttcgtatatttttttgagttgggttgagtatataagtatttttttgtagatagtagaggttttgggatttagaatatgtagtttgaagttttttagagtttggttttttagttaggttttttttgttcgttttgtgaatttacgtttaggagtttgtgtttttatttagtaggagttgatgttgttgagttttttaggtgttagataggggttgagtgtgggggttagggagttagtcgggagtttgttgtttggtaggttatgttttgtagaagagaggttagtatagggtacggtgggtttggaggggttggagatagtgttgttgggtcggtagagttagagaagggtagtttaggtagggggtatattagtgttaaggtgtaggggtatgaagttgtaggttatacggtttttttcggagtttttaggtattgggggtgggtttaaattttatagggttggcgggcgagggttttaggaatagtagggataggagtatgagagtagtagaaaaatgtaggggttaggaggattatttgggatttattaggttgttggtgaatttaggggatagaagggatgtgagtttaggtttcgagtagttgtttgattgggatagtttttggttgggtcgcgattaggttatagtattttgtaggagttaggtttgggttttacggtcgtgggttttagtttcggttgtttagttttaagtagatttttatcgcgttttgatttttattttttgcgtttatttagggtgaaaaaatattttatttttagtataggttagggttgttcgagttgattatgtaggtaggtttgtggggtttttaggtgtttgatattttgtatgtattttggtttttttttttatttttagttttagatggattgagttatttggaatttgttagtggtggttttagttttaattgtagatgataggtttgggagtgtggcgatatgtgttatttggagtaaattgttttttttttgaagtttgttatttataagatttgtttttaagggttaatggtaggtgttttattttttcgtcgttattatcgttgttatttttttattagttttattttttttcgggttttagttttggggcgtttatttttttgtgtgttgagggaggtttagtatggtttaaatgtagtttttggagaatttttttattaagaggttttttttgaaaagagttaagttatttgtagtttaagttggttgaatagattttttttggtgtagtttatttttttatttattaattttttttttttatgaattaaaaaatagtatttttttttttataaaggagtgttttatttatttttttttgtattatagttagcgttttttttgtttgttggggaaagtggatgtatatatttattttggtaggtagtttttttttaagttatggtattttggagaggtaagtgtgtgtgtttagattattgttttgtggttttagtttttttgatattagttatagttttaaggtttgggtgttgtttgtttgtttttttattttttttgagataaggttttattttgttgtttaggttggagtgtagtggtattattacggtttattgtatgtagttttaaatttttaggtttaagtgagtttttggttttagttttttgagtagttgagattatagatttatgttattatagttagttttttttttttaatttttaatttttatagaaacggggttttatatttttgtttagattggttttaaatttttggttttaagttatttttttattttggttatcgaaagtgttataatgataggcgtgagttattaggtttgtttggttggttttttggtgaataggagtataataagggttttattgggttgttagtttttattgtggtggttagtattttaaagttttatttggtagaattggagacgcgtttgttgatcgatgtttttatgatttatttttttgattttagaaatgttttatgtagatattatgttatttagtaggttttttagttagatagggtgtagtttcgatgtgtttgtggagggattcgggttgtttttgtatttatagttatggtgattaaagttttagagtaagggagtagatgtcgttttttttttttagtttaggtattttatatgaggcgttgatttaggattatttttgattttatttttttaaggagtggtttttagttttatatattttattagtttttaggttggttgttttttaaatattggtttttaatttaattgtatttttgtaagtaattttttgggatagatttttttaaaaaagattatgtttatgtcgtattttttattttttttgttttttatttttagatttgttttaaaatttattatttttgtatatatgtgttttttattttttgagttatgtttttgatttgttatgtatttgttttaaggttaagtttaaattttttaatttaaggttgtttagagttgttttgttatttgagttatggggaggggcgttgagttggtgttttttataggttgtttgtttttttttgggtagggtttttgtttttttttttttgtttttataagtataggtttgtatgggttagtacgtggtgaatagttaattattattttttaattttttttaaaaagttttgtttatgtttagaagttttgtttggttttttgagtgtttttatttttatatatatatttttttttttttttttttttttttttttttgagacggagtttggttttttggtttaggttggagtggagtgtagtggtgcgatttcggtttattgtaattttcgttttttgagtttaagtgatttttttgttttagttttttgaatagttgggattataggtatgtgttattatgtttagttaattttttgtatttttaatagacggggttttatcgtgttagttaggatggttttgattttttgattttaatatatatttttttatcgaaattttaaattttttaaagtttagaaatataaaggttttttaaaatttagtggtaaagttggatttgaacgatgcgttattatttattgtttttattttttttagtttatttgaatatatatgttttgtttcgaaaatataaatgggtttgattatgaggagtagttttaggttttaaagaggtgttatataatgtatgatgtatataaaaaagtttgagttttaaatatattttggatgagaggttgggattgtgggggatttttatattggttagagttttagatttagagtagggttatggttaacggcgttttggttatagaatgtagtagagtaaggattgtggaataaagacgcggtttatatgaattttttatttatcgtgttgggtgttggtgatttagagatggaaaggttttagcgatatttttttttatttagggagtttacgggttagtagagggattaaggggtataggacgggtggggagtagaggcggattttttggttgtggaggtattgtttatacggggtgtaggagatatttttatataagggggtttttatttggggaggtggtgatcgtaagtttgatagttttaaagtttttagagatgtcgtttggggatattttgggaaagtttaggcggaggatatttgggaatgtgatagtgatataaatgatcggagagatttgtttttagttattgagtttggttgatttattgaagattagggtttgaatttttttttttgtaaatggggtgtaggttttggttttgtttttatagtgtttttcggttttttataagtttttttcgtagggtgggatcgggtttgtttggagtatttttatagtttatgggttagtagagaagtaggcgtagagttggggtgagacggttagggtcggttttgttagatattttagattatttttttttataaataattttattttatagtttaggaagagagaggtcggattattgtttaaaagtttgtggtttatagtttgttaggtgcgtttgttcgtagagtaggtttgcgtagtatcgagcggttagtaggggtaatgttgggtattggttagtcgcgttaggattatttttgttgatttcggcggggtggggcggagcgtgtagggtttggttcggaaagttagggtaggttttagagaagggttatcggacggatggttcgaggatcggtatggattcgggttttagcgagggcggggggagcgtaaggttgggtttgggttgcggtatcggggaggtggcggggaggaggtcggtaggaatagtcgtgtagggcgggggcggcgcgggtttggtcgggtgatttcgggcgcggttagggttgtaggaggcgagggcgtcgtttcgaggtcgtggtttcgggtttatggtgggggatttgggttttcgttttttcgggtcgttttgggtcgcgcgtgggcgcggcgggcgtcgattggttgtcgggcgcgcgggcggagcgggcggcggcggcggcggcgcggaggggtcgtttatttcgtagttcggtttcggttttcgtcgtttgtcgtcgcgtttcgttcgcgagttcgtttcgtacgtttttcgtcggcggttattatgagtataggtttgcggtataagagtaagttggcgattttaggtgagtttagcgtttgttcgcgtgttcgcgcgcgtttttgttttcgtcgttcgcgcgttttttatcgtgttttttcgtttttttttcgttcgtcggttcggattcgttcggaatcggattcggattcgatttcgatttcgatttcgtagaggataagtaggtacgtgcgtagcgtcgttttttcgtcgggagattcggtcggttgttatttattgtgatattagcgttttgggcgtttaggcgcgatttcgttttcgtcggtttttatttagttttgtcgcgattatcgattgttagtcgggtagtgtcgtcgcgtttggggttttagaggagaggagtgggggttttggttttcggattcgtatagtagggattttgcgtttttttttaggatggggggatgggtagagtgttttttttttatagggttagtgttagtattttttgttgatttggtttgtaggttatgagttgggggttttgggtgaggttatggtcgtggtaggttacgttgggggaggggagttaggttttattagttagtatagtttttgaatagttttatagtagagggtttgtggttattatttattttttttgtatttttatgtttttttttttttttatatataaatttgagtgtttaggtttgtaatagggatttttttttagattgggaatttttagggtttggtttgagttattttgggtgtttagatgggttttgggattttgtgggtataaataggtttgtggttttttaaaagggttggttttattttttaggaaagtaagattggataggaggttggtttaggtatttgggtgaaatttagtcgagtttagggttaaataatgttgtgaggtttttggggtggggcgggggttgataattaggtgggttgggggggttggggaaagtttgttggtgttttttttggtttgagtttagttatttttggaggaaaaaagaagagtttaattttggtattagggtggtattggtagtttttattagggatggagttttttaggagttatggatgttgagtggaattttagagttttggtttagggtgtagtaggtagggtaggagggcgggtaggggggttaggagttgggggagttattggttgattagtgttatttttttggaagggatatattttatttagaggtggatgaggttttttgggaggggttttttggggagttaggttgggagttgtttttttattatagtaggttagataaagtttgagatgtagggatatatgcgttaggttattgtttgagggaaatggaaggaattgaggttgggaaagttaggaggttaggtttttgaggttttttttgtgtttgtaggtgtttttagtttgatttaagggtattttgagattttgggttttagttattgttgttgggtgtagttaggtttttttgtttattattgtagggtggggatttttttttgttgaggtgtttatcgtttgaggttaatcgggagtttattttattttattttaggttttttaggtttttaagtttagaggaagaaggtattgtgtggttaaggaagggagtttcggagtaggagttaggttaggtgtttgggtgattagtgggtttgggggagttggaagtatatggtagtttttttgttattatcgttgttgagttttagtttgtttaagtattttttttgttttttgaaagggggttgtagaggtattgggggagtttcgttattacgttttgtgtttttatttttttataggtagtatcggtgattttttggttttggttgttgtttttagagttgattcgggtgattttaagaatggaagtgttagagaggtttaggtattgggaggagatgggcgtagttgtgttatatggtttaggaagttttgggagtattttttgttatttggggattagagaaagggggtggtaggtacggttttttttttgaggtttttttagggaatttataggttttgattgggttttagtgggtggtagggtaggtgggttgaacgttgagagtgagatttttgtttttttgatttgggtttttttagaggttgtgttttattaatggggaaattgaggtaggtagtttgagagttatatattttgttagatattttttagtttgaggtttaggtttagggttgtttgtttttttggagatgttttgggtttgagatgttagtttgtttgggtgggtgttgggtttcgaggtgtggatttttagttggaaattgggtgggatttagtttagaggttttttgtaggttagggttatggaaggttggggttagtgaggaggttttttggtagtaaggattgagggatgtattggtagagttggggggtttggagttgttttttttttttgggatgaaaggtttttttgtttttagttgtgggtttgttttttttttttaggtgttagtggtttaggttttataataggattagggtttggataggaagtggaggaggttttttagttaggagagtttaagggagggttggtggcgggtggggtggggtggggttggggtttttagtttttaatgttttaatgtgtaggggtttggtttgattagttttattttggaatttttttaggttttatgttttgtttcgttgggtttgtttgttgggattttattggggttatggaggtgggtggtttatagagcggagttcgggagattttcgtagtttttggagtagttatatgggagggaggttcggttggtaggagtttttagtttttttaattttgtgggttagagttggtgaggatgtttagagggtaagggaatgtttatagaagtacgtgggagatgggttttattttatttttatttttgtttttgagggtagggttatttgagggttgtagggtagcgtatgggtggtcggcgtttatttagtaggttggcgggggtttttaagttttgtagggatttttagtatttcggtagtttgtatttttttttttttttttttttttttttgtttattttaagttttttaggggataggtaggttggattttagaaaaggtgggttttgttttttttcggtttttcgaatgttttgggaaagagtttattaaatatatatgtatatattcgcgtatacgtatatatttaatgtatgtatatacgtatatatatacgtatatacgtatgtatatacgcgtatatacgtaggtattatatatatatatattatatatatatattcgtacggacgcgtatatataaacgcgcgtacgtacgtacgtacgtacgggggaggttagttttaagtagggttggggaggggtgtagggcgcggcgtgtttgtgggtatttggggcgtcgagacgtcgtcgggaggttttcgggtaagtttgcgagaagacggcgggttttgaattgggcgggtattcgcgttgttgcgcgtgggtttcgggagcggttttcggcgttttttggcgggcggaagtcgcgtagtattttttgggggcgggacgcgcggtggttatcgattttcggttcgtttcggttcgcgtgtaggattcggtcgtttttttttgttgttttggagttcggattgaggtttcgggggcgcggtagggttttcggtttacgcgagttatggttcgatcgcgtttcggtttagttttgtttttcgtagtcgttttcgggtggtttcgttcgcggtttaatttttaggcgatcgtttttcggcgacggcgggcggggtcgtttttgtcgtttttcgtcgcgcgtttcgcgggcgtttgcgacgtttcgtttttggttcgggtgcgggagcggggtttgttcggattgcgacgtcgttatagtttggggttagttcgtttagttagggggatggttcggtcggtttcgggggtcgacgatttttcgggtaggcgacgtgttttgtttaggttttatttttcgcgttcgtaaaacggggtggataacgtagtttaaggtagagtcgcgttaaggtttttcgttgtcgtcgggttttggcggtttgatcgggtttggggttcgagcgtgttttcgggtttgggggggtcgtcgcgatggattcgttggtagcgttttaggatcgtttggtggagtagttgttgtcgtcgcggatttaggtttagaggcggtttaaggtgcgtgtgtggagagggcggaacgtgggtttgtgatttcgcgggtttcgggattcggtatggggttttcgttttcgcgcgttacggttcgttagcgtttaggtttagttttttttttcgtagcggtttcgtaggttcgcggttttacggtggggcgacgtgttttgtttaggttttattttacgcgattttaaaacgcggcggagaatgcggtcgtgggatttttttaggggttttaagggtttgcgggggttgggcgtttgggcgcgcgggcgggggaggttcggcgtcgcggtttataaataggcgttgtttcgttatcgtcgttgtcgtcgttttcgcggttggattcgggttaggtggggtttttcgttttttggtatttttcggaggggtgagtgtcgaggtttttagttttttcggtttatggagggttttgagtgtgttttaggggttttaattttgttgttttttgttcgaggagggaggatatcgtttgtgtttgttgcggtttgatatttttttacggaataaatatagtgtcggtttttgtagagttttttttgggattggggttaggggtgtttttttttgttattatttcgtttgtttttttatttttaggtttttgtttacgggttttttttttatttttgttaacgaaatgttttattttgggaatcgtattttttgttgtttttttatatcgtatttggtaagagatagggtattgggtttttggagaaatttttgtgtttttattttgttttattttgtttttaggatattgataagtagtacgtgggtttcgttatattgtttaattaggtgtatcgtaagtcggtgaagaaaggttttgattttatatttatggtggttggtgagtgggttaggtttttcgggggagtggttggggttattggttagttaagttttgtcgttggagttttagatttaacgtagttttttttttgtatttgtgtgtaggtgagttaggtttggggaagtttatattggtttatagtttttttttgatagatttgtataaggatcggaagttgtttagtgttgagggtgagtggtttttaggaggttttggtattgatttttagtttttttttatgggatttttttaaggatttttttttaggtttagtttttattgttttgttttcgcggtgtgggttttttgggggtagggttaaggtattaagatggatgaggacgagggttttggttgttaagggtgaggggttgagggttggagaggtttttttagtggtttttttttcgtagagcgtattagttagacggtagagattttaaaatatacggtggatattgaggagaagggagttaagttgaagtttattatcgtggatacgtcgggattcggggacgttgttaataatatcgagtggtgagtgaggtttgttgagaaaggttttgtttaggcggttatagtattcgaggtttggttttattttttttttgtttatagttggaagtttattatcgattatgtggattagtagtttgagtagtattttcgtgatgagagcggttttaatcgaaagaatatttaagataatcgagtgtattgttgtttatattttattttttttttcgggtatgggtgtgtggttgttttggggttaggttcgggagtgtagtttttataatatggttttttggttgtgtttatgtttatttttggttgttttcggtaggttgcggttagtggatgtgggttttatgaaggtattgtatgagaaggttaatatcgtgttttttatcgttaaagttgattgttttgtttttagtgagattcggaagttgaaggagcgggtgagtttgtcgtcgtataggggtttggttagggttttggggttgagagtattagggggatttgtttggttttaaatttgatggtttttgttttattatagattcgggaggagattgataagtttgggatttatgtatattagttttttgagtgtgattcggacgaggatgaggattttaagtagtaggatcgggaattgaaggtgaatatgtagattggtggggtaggggggatggagttggtgaggggtagaattagagggttttgttttttttatattgagtttgttggaggagggttaggttagtttagttgggtgtaagagttatttgttttaggagtagaggatttgtattttttttatttagggttagaaggtaaaggttattatgtttttgtttggttggggtgggttatgtgggtttcgtgtggtgtttggtaggtatggagtatttgtttagatttagaggtgtagtagtgggttaggtttttaattttaattttttttttatgggttattagaggaaggggttgttttagtggtatattttggtttttagatttttgagttttagggttggtggttttgggtgtttcggtagttagagtgatgatggagattatgttaggggtaggtggttattagggtaggggtattagtatggggagatataggtttagttttggggagggaaggggtagttggagggggtggtttttgatgagggaggagatgaggagggagtatgtttggttgggtatagtttggaaaggttttggaatgtgagttatatgggttttggttttagttaggggtagagaggttagaaaggggtaacgttaggatttttttgaggagagatagttgatggtgatgttggaggggtgtttcgggagttatatgttcgttttttattagtaatcgtgtaattacgtttatcgggtgtgagttttttttttttttttttttaggagagcgcgtttttcgtcgttataggtagtaatacggtggtggaggttaaggggtagcgggttcggggtcgattgtatttttgggggatcgtggagggtgagtagagttttggggtattaggtttggtgggggaaggttgttttgggtcggcgttagtttattatttatttttatttcgtagtggagaattaggcgtattgcgatttcgtgaagttgcgtaatatgtttattcgtacgtatatgtacgattttaaggacgtgacgtgcgacgtgtattacgagaattatcgcgcgtattgtatttagtagatgattaggtgcgcgttttagtcgcgagttagatttcgtttttttggtttcgtttacgtttttataattgagggtcggttttgttagtttatttagatttgaattttgtattattttttaagtttttttttttttttagagtttggtttttttagaattaagtttagggttgtgagggtttcggagggtagggttttagtagtggcggggatgggttaggtatcgttagtttacgttgagtttttcggtggcgtcgtttcgtttattttttttttcgtttcgcgtagtaaattgatttaggatagtcgtatggagagttttatttcgattttgtcgttgtttatttcggacgtcgagattgagaagtttattaggatgaaggatgaggaagtatgtggggcggcgggggcggcggaggcgggcgttagggatgttttttcgcggtgttgtttattcgtcgggttgttttcgttcgtagttgaggcgtatgtaggagatgttgtagaggatgaagtagtagatgtaggattagtgacgttcgtcgcggatatatcgttcgttttcgggacgttttcgtatttttggatattagatcggattgttttcgattcggagacgcggggttatagtttttagttgattttaatttatttttagtattatttttttttaggttattgtgtttgttttcgaggggtttggatcgtagttttcgtttagttggttttttttgattttgggggattaggagcgaagttgggcgggattttagagattcgttttttttgtttttttttcgttttcggacggttatagtatttaaatcgtaggttttgttttggtaggtaggtaaagttaggtagaagaggatttttaggattttgggtttgttttttgttttagtgttgtagaacggatttgggagtttttttttgtttgttttcgcgggttatttagcgagtgttgagattttattttttgtcgaggcgggtcgagtttttttttatttttagacgtttagcgggtagggttgggttgaattaaatgggagttttttagatataaggaggttagaggttgtaaggagcggggtcgtgatcgtttatattttttttttatagttcggttcgatttggagggttttcggggtattgggcggtgagttattttttggtaattttcggtgtcgttttttgttttcgttcgaggttttttttttttagtatcgttgtggtgtgtcgggattttgagtttaggtttttcgatgtttttattcgtatgattttttttcgttatacgatgtttcgttttttttcgttgtgaatgtcgcgttttgttttggtgataggagaataatgttggtgaacgtcgtagcgggtgttcgagtgtttcgtgtgtttttgagagcgggtgggagcggaagtttgagcggtttgcggttttcggcgatagtgtgttatttgtcgttgtagcgcgcgttcgcgcggtttttgggttatttttggttaggtcgtagtattgtggtcggtgcgggcgtggtaggggcggggcggttttatcgttcggttttttcgtttacgtttttcgttgtagagtaagtcgggttgtcgttttttcgttatgggtttcggtgagtttggagttcggtcgggttttcggttgttttttaggtcgattcgggttgagaggagttttggtcgtttggttgtagttgggagagatttgggttagatttagaggggatttttagtcggcgtgcggggtggttagggtggagaggttggcgggttatcgggacgtcgggtattaggggttggatggagtcgggtcggtagtttgggtatttagagatgtcgtttaggtgttcgtcgatcgttcggtttattgcggcgttttttttgtagg

SEQ ID NO: 2408 - DNA, 14353 bp, Artificial Sequence
  chemically treated genomic DNA (Homo sapiens)
tttgtaagggaagcgtcgtagtaagtcgagcggtcggcgggtatttgggcgatatttttgagtatttagattgtcggttcggttttatttagtttttgatgttcggcgtttcggtagttcgttagtttttttattttgattatttcgtacgtcggttggaagttttttttaagtttgatttaagttttttttagttgtagttaaacgattagagttttttttaattcgggtcggtttagggagtagtcgggggttcgatcggattttagatttatcggagtttatggcgagaagacggtagttcggtttattttgtagcgggaggcgtaggcgggagagtcgagcgataaggtcgtttcgtttttgttacgttcgtatcgattatagtgttgcggtttggttagaaatagtttagaggtcgcgcggacgcgcgttgtagcggtagatagtatattatcgtcggaggtcgtaggtcgtttaggttttcgtttttattcgtttttaggggtatacggagtattcggatattcgttgcgacgtttattaatattgtttttttgttattaggataggacgcggtatttataacggaagaaaacggagtatcgtgtggcgggaagggattatgcgggtgggaatatcgggaggtttaggtttaggatttcggtatattatagcggtgttggggagaagaggtttcgagcgagggtaggggacggtatcgagagttgttaggaggtggtttatcgtttagtgtttcgggggttttttaggtcgggtcgggttgtggagaaggggtgtaagcggttacgatttcgttttttgtagtttttggtttttttatgtttggagggtttttatttgatttagtttaattttgttcgttaggcgtttggggataagggaagattcggttcgtttcgatagaaaatggggttttagtattcgttgggtgattcgcgggagtaggtaaaggagggtttttaagttcgttttgtagtattggggtagggaatagatttaggattttgggaatttttttttgtttagttttgtttgtttgttagagtagggtttgcggtttgggtgttgtgatcgttcgggggcgggggaagggtaagggaggcggatttttgaagtttcgtttaatttcgtttttgattttttaaggttagagagggttagttgggcgggggttacggtttaggtttttcggaaatagatataatgatttgggagggggtggtgttgagaataaattagggttagttgggggttgtggtttcgcgttttcgggtcgggaatagttcggtttggtgtttaggggtgcgagggcgtttcggagacggacggtgtgttcgcggcgagcgttattggttttgtatttgttgttttattttttgtagtattttttgtatgcgttttagttgcgggcggagataattcggcgggtgagtagtatcgcggaggagtatttttgacgttcgttttcgtcgttttcgtcgttttatatatttttttattttttattttgataagttttttagtttcggcgttcggggtgggtagcggtaggatcgggatggggttttttatgcggttgttttgggttagtttgttgcgcggggcgggggggaggatgggcggggcggcgttatcgggaggtttagcgtgggttggcgatgtttggtttattttcgttattgttgaggttttgtttttcggagtttttatagttttggatttggttttagggagattaggttttgggggagggggggggtttagggaatggtgtaaagtttaagtttgggtgggttgataggatcggtttttagttatggagacgtgggcggggttagaggggcgaggtttggttcgcggttggggcgcgtatttggttatttgttggatgtagtgcgcgcggtagttttcgtagtgtacgtcgtacgttacgtttttgaggtcgtgtatatgcgtgcggatgagtatgttgcgtagttttacgaagtcgtaatgcgtttggttttttattgcggggtgggggtgggtagtgggttggcgtcggtttaggatagtttttttttattagatttggtattttaagattttatttattttttacgattttttaggggtatagtcggtttcggattcgttgttttttggtttttattatcgtgttgttgtttataacggcgaagggcgcgtttttttgggggaaggagggagaaaggtttatattcggtgagcgtaattgtacggttattgatgggaaacgggtatgtaattttcggggtatttttttagtattattattaattatttttttttaaagagattttggcgttgtttttttttggtttttttgtttttggttggagttagagtttatgtggtttatattttagggtttttttaggttatgtttaattaggtatgttttttttttatttttttttttattaagaattattttttttagttgttttttttttttttagggttgagtttatgtttttttatgttgatgtttttgttttggtggttatttgtttttggtatggtttttattattattttagttgtcggggtatttaaagttattaattttggagtttagaaatttgggagttagggtgtgttattggggtagtttttttttttggtgatttatgggaagagggttggggttgggggtttggtttattgttgtatttttggatttgggtaagtgttttatatttgttaagtattatacggggtttatatgatttattttagttaggtaaagatatggtgatttttattttttagttttggatgaagggggtataggttttttatttttagaataaatgatttttgtatttaattgggttgatttggtttttttttagtaggtttaatgtgaaggagataaagttttttggttttgttttttattagttttattttttttgttttattagtttgtatgtttatttttagttttcggttttgttgtttgaagtttttattttcgttcgagttatatttagggaattggtatatatggattttaaatttgttaattttttttcggatttgtggtggggtaaggattattagatttgaggttagataagtttttttggtatttttagttttagggttttggttaggtttttgtgcgacggtaggtttattcgtttttttagttttcggattttattggggataagatagttagttttggcgatgagaggtacgatgttgatttttttatgtaatgtttttatgaaatttatatttattggtcgtagtttgtcgagagtagttaagggtgggtataggtatagttagggggttatattgtaggggttgtattttcgagtttggttttaggatagttatatatttatgttcgaagggggagatgaagtataggtagtagtgtattcggttgttttggatgttttttcggttgaggtcgtttttattacggaagtattgtttaaattgttggtttatatagtcggtgatgggtttttagttgtgggtaggagggaggtgaggttaggtttcgagtgttgtggtcgtttaggtaaggttttttttagtaggttttatttattattcggtgttgttgatagcgttttcgaatttcggcgtgtttacgatggtgagttttagtttgatttttttttttttaatgtttatcgtgtgttttagaatttttatcgtttggttgatgcgttttacggggaaggggttattggaagggtttttttaatttttagttttttatttttggtagttaggattttcgtttttatttattttggtgttttggttttatttttaggggatttatatcgcgagaatagaatagtgggagttggatttgaaagggagtttttggagaggttttatggaaggggattggggattagtgttagggttttttgggggttatttatttttagtattgagtagttttcggtttttgtataagtttgttaggaagaggttgtggattagtgtggatttttttaggtttgatttatttgtatataggtatagagaaggagttgcgttaggtttggggttttaacgatagagtttggttggttagtgattttagttattttttcgaggagtttggtttatttattagttattatgagtgtgaagttaaagtttttttttatcgatttgcggtgtatttggttgggtagtgtggcgaagtttacgtattgtttgttaatgttttggggataggatggaatagggtagggatataaaggtttttttagaagtttaatattttgttttttattaaatgcggtatgaggagatagtagagggtacggtttttagggtggggtatttcgttggtaaaaataaggggagggttcgtgggtaaaagtttggagataagaaggtaggcgaggtggtggtaggagaaggtatttttggttttaattttagggagggttttgtagggatcgatattgtatttatttcgtggggagatgttaggtcgtagtaggtataggcgatgtttttttttttcgggtagagggtagtaggattgggatttttgggatatatttaaggttttttataagtcggagaagttgggggtttcgatatttattttttcggagagtgttagggggcgggaggttttatttggttcggatttagtcgcgggggcggcggtagcggcggtggcggagtagcgtttatttatagatcgcggcgtcgagtttttttcgttcgcgcgtttaggcgtttagttttcgtagatttttggggtttttggaggggttttacggtcgtatttttcgtcgcgttttggagtcgcgtgaggtgaggtttggatagggtacgtcgttttatcgtggggtcgcggatttgcgaggtcgttgcggagggaagggttgagtttaggcgttggcgggtcgtggcgcgcggggacggggattttatgtcgagtttcggagttcgcggggttatagatttacgtttcgttttttttatatacgtattttgagtcgtttttgggtttgggttcgcggcgatagtagttgttttattaggcggttttggggcgttgttagcgagtttatcgcggcgatttttttaggttcgggggtacgttcggattttaggttcggttaggtcgttagagttcggcgatagcgagggattttggcgcggttttgttttaggttgcgttgtttatttcgttttgcggacgcgggaagtgaggtttggatagggtacgtcgtttattcgggggatcgtcgattttcgaggtcgatcgagttatttttttgattgggcgaattggttttaagttgtggcggcgtcgtagttcgggtaggtttcgttttcgtattcgagttagaggcggggcgtcgtaggcgttcgcggagcgcgcggcggggggcggtagagacggtttcgttcgtcgtcgtcgggaaacggtcgtttggaaattgggtcgcgggcggagttattcgaaagcggttgcggagggtagggttgagtcgaggcgcggtcgggttatggttcgcgtggatcgggagttttgtcgcgttttcggggttttagttcgggttttaggatagtaggaggggacgatcgggttttgtacgcgggtcggggcgggtcgggagtcggtagttatcgcgcgtttcgtttttaagaggtgttgcgcggttttcgttcgttagagggcgtcggaggtcgttttcgggatttacgcgtaatagcgcgggtattcgtttagtttagggttcgtcgttttttcgtagatttgttcgaaaatttttcggcggcgtttcgacgttttaagtgtttatagatacgtcgcgttttgtatttttttttagttttgtttggggttgatttttttcgtgcgtgcgtgcgtgcgtgcgcgcgtttgtgtgtgcgcgttcgtgcgggtgtgtgtgtgtaatgtgtgtgtgtgtaatgtttgcgtgtgtgcgcgtgtatatatgcgtgtatgcgtgtgtgtgtacgtgtgtgtatgtattgggtatgtgcgtgtgcgcgggtgtgtgtatgtgtgtttggtggatttttttttaagatattcgggggatcggaggagggtagagtttattttttttgaagtttagtttgtttgttttttaggaggtttagggtggatagaagggaagggaagggaaaggaagggtgtaggttgtcggagtattggaggtttttgtaaaatttggaagttttcgttagtttgttgaataaacgtcggttatttatgcgttgttttgtagtttttaggtggttttgtttttagagataggggtgggggtgggatgggatttattttttacgtgtttttgtggatatttttttgttttttgagtatttttattagttttgatttataggattggagggattgggagtttttgttagtcgggttttttttttatgtggttattttagggattgcgggggtttttcgagtttcgttttgtgggttatttatttttatgattttagtagaattttaataggtaagtttagcggagtaggatatggggtttggaaaggttttagggtaggattggttaggttaagtttttgtatattagaatattagaagttggaggttttaattttattttattttattcgttattagtttttttttaggtttttttggttgagagattttttttattttttgtttaggttttggttttgttgtggggtttggattattggtatttggggaggaggggtaggtttatagttgggaataggagagttttttattttagggaaagggggtagttttaggttttttagttttattagtgtattttttagtttttgttgttagaaagtttttttattggttttagttttttatggttttgatttgtaggaagtttttaggttgagttttatttagtttttaattgagggtttatatttcgaagtttagtatttatttagataggttggtattttaggtttagggtatttttaggaagatagatagttttgggtttaggttttaggttaggaggtgtttaatagagtgtgtggtttttagattgtttgttttagtttttttattggtaaggtatagtttttggggaggtttaggttaggagggtaagaattttatttttagcgtttaatttatttgttttgttatttattggggtttagttagggtttgtggattttttgggggagttttaaggaaggggtcgtatttgttattttttttttttggtttttaagtgataaaagatatttttagggttttttgagttatatgatatagttgcgtttatttttttttaatgtttgagtttttttggtatttttatttttagaattattcgagttagttttgggagtagtagttagggttaagagattatcggtgttgtttgtgaggaggtgggggtatagagcgtagtgacggaatttttttaatgtttttatagtttttttttaaagagtaaaaagaatgtttggataggttgaggtttagtaacggtggtagtagggaagttgttatgtgtttttagtttttttagatttattggttatttagatatttggtttggtttttgtttcggggtttttttttttggttatatagtgttttttttttttgggtttggaggtttgggaggtttgggatggggtgaggtggattttcggttgattttaaacgatgggtattttagtaggagggggtttttattttgtagtaatgggtaagagaatttggttgtatttaatagtagtggttggagtttagggttttagagtgtttttgggttaagttggggatatttgtaggtataggagaagttttaggggtttggttttttggtttttttagttttagttttttttattttttttaaatagtagtttgacgtatgtgtttttgtattttaggttttgtttgatttgttgtgatggggaggtagtttttagtttggttttttaaggggttttttttagagagttttatttatttttgggtggggtgtgttttttttaggagaatggtattggttagttagtgatttttttagtttttggtttttttgttcgtttttttgttttgtttgttgtattttgggttaggattttggagttttatttagtatttatggtttttgagaaattttatttttgatgggggttgttagtgttattttggtgttagaattgggtttttttttttttttttaaagatggttgagtttaagttagagaggatattagtaggttttttttagtttttttagtttatttggttgttagttttcgttttattttaggggttttatagtattgtttaattttgagttcggttgggttttatttaggtgtttagattagttttttgtttagttttgtttttttggagggtggggttaatttttttgagaagttataagtttatttgtatttatagggttttaggatttatttgggtatttagaatgatttagattagattttgggggtttttaatttggggaagagtttttgttgtagatttgaatatttaaatttgtgtatggggagggaaaggggtatgaaggtgtaggggaggtgggtggtgattataggttttttgttgtagggttgtttagggattgtgttggttgatggagtttgattttttttttttagcgtggtttgttacgattatggttttatttaggatttttagtttatggtttataggttaggttagtaggagatgttggtattggttttgtgggagggggatattttgtttatttttttattttggggaggggcgtagggtttttgttgtgcgggttcggggattagggtttttattttttttttttgaagttttaggcgcggcggtattgttcggttgataatcggtgatcgcgatagggttgggtgagggtcggcgggggcggggtcgcgtttgggcgtttaaggcgttagtgttataatgggtgatagtcggtcgggtttttcggcgggggagcggcgttgcgtacgtatttgtttgttttttgcggggtcggggtcggggtcgagttcgggttcggtttcgagcgggttcgggtcggcgggcgggggagagacggagagatacggtgagaggcgcgcgggcggcggggataaaggcgcgcgcgggtacgcgggtaggcgttgggtttatttggggtcgttagtttgtttttgtatcgtaggtttgtgtttatggtggtcgtcggcgggggacgtgcggggcgggttcgcgggcggggcgcgacgataagcggcggaggtcgaggtcgggttgcggggtgagcggttttttcgcgtcgtcgtcgtcgtcgttcgtttcgttcgcgcgttcggtagttaatcggcgttcgtcgcgtttacgcgcgatttagggcggttcgggggggcggggatttaggttttttattatggattcgagattacggtttcggggcgacgttttcgttttttatagttttggtcgcgttcggggttattcgattagattcgcgtcgttttcgttttgtacggttgtttttgtcggtttttttttcgttattttttcggtgtcgtagtttaggtttagttttacgtttttttcgttttcgttgggattcgggtttatgtcggttttcggattattcgttcggtggtttttttttaaagtttgttttggtttttcgggttagattttgtacgtttcgttttatttcgtcgaggttagtagggatggttttggcgcggttggttagtgtttagtattgtttttgttgatcgttcggtgttgcgtagatttgttttgcgagtagacgtatttggtaggttgtaggttataggtttttgggtagtggttcggtttttttttttttgggttgtaaaatgggattatttgtgaagaggagtgatttgaggtgtttggtaggatcggttttgatcgttttattttagttttgcgtttgtttttttgttgatttataggttgtggggatgttttaggtagattcgattttattttgcggagaaggtttgtaggggatcgaggggtattgtgaaggtagggttagggtttgtattttatttatagagggggaagtttaggttttaatttttagtgagttagttagatttagtgattgagagtaagttttttcggttatttgtgttattattatatttttaggtgtttttcgtttggatttttttaaagtgtttttaggcggtatttttgaaggttttggggttgttaggtttgcggttattatttttttaggtgagggtttttttgtatggagatgttttttgtatttcgtatagatagtatttttatagttagggaattcgtttttgttttttattcgttttgtgttttttggtttttttgttggttcgtgggttttttgggtggaggggggtgtcgttagggtttttttatttttgaattattagtatttagtacggtaagtgaaaaatttatgtaagtcgcgtttttgttttatagtttttgttttgttgtattttgtggttagagcgtcgttgattataattttgttttgggtttagaattttaattagtgtagggattttttatagttttaattttttatttaagatgtgtttggaatttaggtttttttgtatatattatatattatgtggtatttttttggaatttggggttgttttttataattagatttatttatattttcggggtaaaatatatgtatttaggtgaattggaagaaataaagatagtaagtgatggcgtatcgtttaggtttagttttgttattgagttttgaaaaatttttatgtttttgagttttggagaatttggaatttcgataaagaaatgtgtgttgaggttaggagattaagattattttggttaatacggtgaaatttcgtttattaaaaatataaaaaattagttaggtatggtggtatatgtttgtagttttagttatttaggagattgaggtaggagaattatttgaatttagaaggcggaggttgtagtgagtcgagatcgtattattgtattttattttagtttgagttaaagagttagatttcgttttaaaaaaaaaaaaaaaaaaaaaaaaaaaagaatgtgtgtgtgggggtaggggtatttaaagggttaggtaggatttttgagtatagataggattttttggaaagaattggaaaatgatggttggttgtttattacgtgttgatttatgtaagtttgtgtttgtggagataaaggaggagagataggagttttgtttagggggaggtaggtagtttgtgaaaggtattagtttagcgtttttttttatggtttaggtggtagggtagttttggatagttttgggttagggggtttgaatttggttttgagataagtgtatagtaggttaagggtatagtttaaagggtgggaggtatatgtatataggagtaataggttttaaaataaatttggagatagaagataagaaagatgaggaatacggtataaatatgattttttttaaaaaagtttgttttaaaagattatttatagaaatgtagttagattggagattagtgtttaagggatagttagtttggaggttgatggaatatataggattgggagttattttttggaagagtgaagttaagggtggttttgggttagcgttttatgtaaaatgtttgggttggaagggggaagcggtatttgtttttttattttgggattttggttattatgattgtgagtgtagggatagttcgagtttttttatagatatatcgaggttgtattttgtttagttgggaggtttgttggatggtatagtgtttgtatgggatatttttgaagttaggaaaatgggttatgagggtatcggttagtagacgcgtttttagttttgttaggtgaggttttgagatattggttattataatggaggttgatagtttagtgaaatttttattatgtttttgtttattaaaaagttaattaggtaggtttggtggtttacgtttattattgtagtattttcggtggttaaggtgggaggatgatttgaggttaagagtttgagattagtttgggtaagaatgtgagatttcgtttttataaaaattaaaaattaaaaaaaaaaaattggttgtggtggtatgagtttgtagttttagttatttaggaggttgaggttagaggtttatttgagtttgggagtttgaggttgtatgtagtgagtcgtgatggtgttattgtattttagtttgggtaatagagtgagattttgttttaaaaaaaatgaaaaaataaataaataatatttaagttttggggttgtggttgatattaggggggttggagttatagggtagtggtttgaatatatatatttatttttttaagatgttatggtttgaaagaaaattgtttgttaaagtgggtgtgtgtatttattttttttagtaggtagaggaagcgttggttgtggtataaaaagaagtaaataaagtatttttttgtggaaaaaaaaatgttattttttaatttataaggaaaagaagttaatgaataaaaaaataagttatattaagaaaaatttgtttaattaatttgggttataaatagtttgattttttttagaaaaagttttttagtgaagaaattttttagaggttgtatttgaattatgttgggttttttttagtatataggggagtgagcgttttagggttgggattcggagaaggatggagttggtggggaggtggtaacggtgatggcgacgaaagaataaggtatttgttattggtttttgggagtaggttttgtgggtgataggttttagagggggagtagtttgttttaggtgatatatgtcgttatatttttaagtttgttatttgtagttagggttgaggttattattgataggttttagatggtttagtttatttgaggttgaggatgagggaagaggttaagatgtatgtagggtgttaggtatttgagagttttataggtttatttgtatgattaattcgggtaattttgatttgtgttgggaatggggtgtttttttattttgagtagacgtaggaagtggaggttagggcgcggtggagatttgtttgagattaaatagtcgagattagaatttacgatcgtggagtttaggtttgatttttgtaaagtgttgtgatttggtcgcggtttagttaggggttgttttaattaggtagttgttcgaggtttgagtttatattttttttattttttgaatttattagtaatttggtgggttttagatgatttttttgatttttgtatttttttattgtttttatgtttttgtttttgttgtttttgaagttttcgttcgttaattttgtgagatttgaatttatttttagtatttgggggtttcgagggaggtcgtgtgatttgtagttttatgtttttgtattttggtattagtgtgttttttgtttgggttgtttttttttagttttgtcgatttagtagtattgtttttagtttttttaggtttatcgtgttttatgttggttttttttttgtaggatatggtttgttaggtagtagattttcgattggttttttggtttttatatttagtttttgtttggtatttgggaagtttagtagtattagtttttgttgggtgggggtataggtttttaggcgtggatttatagggcgggtaaggagggtttgattaaagagttaggttttggggagttttagattgtatattttgaattttaaaatttttattgtttgtagaggggtgtttgtgtgtttagtttagtttaggggggtgtgcggagattaggaggttttggggcgttttttttgtttttaaaggtagtggttgttatcgagtataaggggaagtgtgtgtatagtgaggattttattgaagaatgttttttttgattttttttttagaaaaatgtaagggggttattgtataaattagtttttattatcgatgggaagatatgtttattagaagagtatagaatttatagtagttgtttttgtttggagggtgcggtttggttttgtttaaagtcgtttatgttttgtagcggtggatagaatagggttttaagggggttgagttttagtttatattaagttttcgattttttgggtagttggagtgagtgttataaagggcgtttgtgttttacggtagggagttagtttggatttagagttgagggtttgagggaggtgggtttgtagttatatttgatgggtttttagagttttttg

SEQ ID NO: 2409 - DNA, 7763 bp, Artificial Sequence
  chemically treated genomic DNA (Homo sapiens)
aagtgtaggatggtttgtttttgaaatatatttggtttaaatgtttattatgggagagagaaatagataggagttgaagaaaggagcggggttttgttgttttttgtttatggagtacgtagggcgggcggatgaaggtcggagttagtcgaggttgggattgagtattaagattggtttgggatggatttgatttttggttaatagaggagataaggggtcggttgggagtgtgatttagaaagaggtagaggagcgtgtgaagatggggttaaagtatttggaaggttggttggggaatgaggcgatagaaattattaataggggaggtggcgtttatagggatggtttattgtttttgagatggaggttttggggtttttggggtggatatagttgtggacgttttttggaagagttaggggtagtagtgataaagatataattagagggtttttaattagtattttttttaaaagatgttttttttttttttttagatttattttagttagtttatattttggtggtaaggtttttttttgtttttattatatagaattattaatttttaatattaggttttttaagttgtttgttcgggttaggggagtattgtagggagaggttgaaatagtgttttttttgggattttttggttgttttattgttttatttttattttcgttatttttatttaaatttagaggttttaatagatagttaaggtttagtagtttaggagttggagttggataatttgaggagtaagttaataaggttaattttgttatgtttatttttgttttttaggagaaggatatgattttttttatattttatttaaaaattaaaattaattttttggtgtaaagtttatgttttttttgaaattaggtggaatagtaagaagatttgtaggatagggatatggaattaggttattgtatattggtgaataaattgtgtatattatataaatttaaaagatattatttataggatagatgttgtagatagggatgtttgttatgatatttttttaatagatgatagtaaaggttgttgtagaaattttttagtagatgatagtaaaggttgttatggatagaatatttttttttaatttttttaaaaatatgggagggttagtagtagtttagtgatagtttgggttttttttttttaaggtttagatttagagttttattttattttttttaaagtttattttttttttagttttttttcgtgtgtttagatttgttatggtgggtttatttattttttttgggaagagataggatagatagggatttatgggatgagggtaatacgagataggtggggaatttttttttggagattaaagatatttttttttattattttatttttataagagttatttggttagaagggatatcgagttggatttttttataaggattgggaggttggttttggaggtcggcgaagagataaggaggttgtagtcgagagatttgtgttttttagtaagatttaaggtaagagattagagttttaatgaggttgagtttgtttttgattatttttttttttttttaattgttttttatgatttttgattttttatttttttgtaatttagtatttggtttgtggttgggtgtttttgggtttgtaggtcggatgggattggggtttttaggatagttaaaagagattagggattcgtttttttttgttattttttggagagaaaaatagtaatttttgggttttttttttttttttgttttagttttttttaggaatttattattttagtttaagtttttttagattttttatcgggttgagtgttttatattatgtagaggtagttaggttggggatgatagaaataattgttttgttttttgttgtagatttggggtataaggagggaggttatggggaagttgaaataagggtaagatgagaggtattaggtaaggaaagaggataaaatgtagataaaagagatgatgggatttgtgtttagattagaaatggtagatgtgttaaatagattaggataattaggtttggttaaaaattatttgttattgaattatttggggtagattttggattttagaaatatggaggttggatttaggaatgtgtatttttaaaaagttttttggttaattatgaagtatattgaaattggagatttattgattttagaaaaaggggttttagatttaaggatgaaaggttggaggtttaaagtttattattttagttattaagtgttttggtgtttggatatagaagggagttttacggagaaatgttatatttgaaagagtagtttttaaagtaaaaatatttttagttttttttgttttgtttttatacgtattgtaggtatattgggttgtaatttgtttagtatttttttaggttgggatggataggagtataggtatagatgaataaggttaagttagattttattgtgaggagggtgaaggaggtttggatttaatgcgggttaaaggttagggttaaaagttatttacgttattttttggagttttaggtaagtttagtagtttttagtgtttcgtgtattcgagttttacggttcgaaggggtaggtttaggggatttggagggggtagtattacggggaaaggttaaaagttaggggttaaagtttattttatatcggttatttcgttttatttttttttttttttttttattaagtcgttttgtttttattattttggagttatagtagttgtttggtagttcggaagtgcggtaagtagtcgttgcgaagtaagtttcgtttcggaacgggcggaagtagaggtaattttcggtatagtttcgtcgagagcgtgaattatcgttgcggaggggtagatttggatcggtggaaggtcgggcggaagtgcgcgtttggggtcgttttggttatcgcgtttttcgtttttcgttacgttatcgttgtgagttcgttattagcggttagcgcgggcgcggtcggagatcgtggggttttcggttgtcgttttttcgggtaaggttttttgttttttatttttcggtttttttttttatagtcgtttttttgttttttttttttgcgttgttttgcgggcgttacgttggttttatcgttttttttgtcgtttaaatttcgcggttgtttttattttagcgagggtaggggggtcgggtgttatcgttttttcgacggagtggatatttgtttttttttgaattatatggtatttaaaggtgttggtgtttgtgatttttggagataggagggaatgttggatgatttcgattagcgggagtttggatagtagtttggtttaagtaaggggtagggaaagttaaagataagagtaggtagatttgaaggggtggggttgggtatagtgtggacggcgtgtgaatttcgggtggtaatagtggagaaagatgttttgggttttgtttttgaattaggagttattatgttggtgatatttttcggattgagcgaggaagaggaggttttgtagaagaaatttaataagtttaagaaaaaggtgagggattgtgtgtggatatggtttaattttttatagattttgtattttgagaagatatggggtgagtgtgagcgaatggggaagtttttttggtttatatttagagatatattattttatagtgtagtttcgagaggtgggtttttttaagttttggtgtggattttttgttttttttatgtaatttgttatggattgttttttttttttatggtttttagtatcgtttaagagttgatgatttttaagtttgttttttttagttttatttagtgttatattgaaaaattttagatatttagtgttgaagttattatttttttatttttgattttttaaataagattgattatattaattttgttatatgtttggatttaaaattttgatttttttattatttgtatagttaaatttttgttaagttttattgtttttttttttgaagtaattttttttgtttattttttattgtgtattttttcgagtagggttttattgatatttatgtgggttattgtaatggttttttaataaattttttagtttttttttttgaatagatttttttatttttgtttaaatgatttattgaaaatataaaattttgttttttttgttttttaaaaattataaatggttttatattgtttataaaaaagttttaaaattttagtttggtagttttgtttagtaaagtagaattatttattatttttaaaagatgtatttttaaagtttttttatttttgtatttttgttattttgttttttttttttaaaatattttttttttttttgtgttgtgtagagatacgggagagggtttagtttaatagttattaaatattagaaaattttattagtttttagttatgaataatttgtattttttataattgtattgttaatttaatgtattttattttttagattgtaagttttttgagggtaggaataatgtattagttttttggatatttttgttacgaagttatggttgggttttatttaatatgtaggaaatagatggatgaagtttttaggaaaggtatataaatttatatttatttgtagtttatattttaggattttagtttatgattgagttatttgtttttaattttaaaaatgtaatattttggaaaatttttgggtttcgtggtttggttagattaggaatttttagtattatatatgatttaggggattagaggtaagaggtagagtatattagtgtattattttgagggtattaagaaagatggtttttggagtgatgtgtttaggggttttaggagaggaatcggttaggggttggtttttatttatttttttttttttatttttgtttttagaaaaaggtattgttggttttgaagaagtaaagtagtagtagtataattagttaaggtggtgttaaacgttgtgagtgataggggaaatggggatggattggaagtgggtagtatggagttgatttttattatggtttggttaatataatgttttttttttttgtttttttagtattattagagtagtttgttatggatatagttatagtaatagagtaggtaaagtagttggtgaagttaggagttattagtgttattaaggttgagattaagaatttaggttttaagcgttttcgaatttttgaggggaagttaaaggtgagtataagtagaaagattgtttaaagggtatttttttaagttggaatgtagatgggtttggggaaaaatatgtatatttaagtattggtaaattgttgtattattttgagttttattttttatgtataaaatgaaaaaattagacgatttttgaattttttattttataaattttgtggttttaatttattttggattggagtttttggaatatgttgttttaagggatggaaagggttgaaaatgttattaggtttaagagaggtttaaataaattgaatatataatatatcgagttatttataaaaaatattagttgggcgtggtggtttatgtttgtaattttagtattttgggaggttgaggtgggtagattatttgagattaggagtttaagattaatttggttaatatggtaaaatttcgtttttattaaaaatataaaaattagtagggtgtgaggtcgggtacggtggtttatatttgtaattttagtattttgggaggtcgaggtaggcggattacgaggttaggagatcgagattattttggttaataaggtgaaattttatttttattaaaaatataaaaattagtcgggcgtggtggcgggcgtttgtagttttagttatttgggaggttgaggtaggagaattgtttgaatttaggaggcggagtttgtagtgagtcgagattgtgttattgtattttagtttgggtgatagcgagatttcgttttaaaaaaaaaaaaaattagtagaatgtggtggtgtatatttatagttttagttattgaggaggttgaggttagagaattatttgaatttaggaggtagaggttgtagtgagtggagattatattattgtattttagtttggacgatagagtaagattttgttttaaaaataaaataaaataagttataatggtaggtgcggtaatggtttatttttggttaattttagtattttaggaggtcgaggtaggaggattgtttgagtttaggagtttgagattagttttggtaatatagtgaaattttatttttataaaaaaaaaaaaaaatatagaaattagttaagtatggtagagtatatttttagttttagttattagggaggttgaggtaggaggattgtttgagtatgggaggttaaggttgtagtaagttacgattgttttattgtattttagtttggataatagagtaggatcgtgttttaaaaaaaaaaaaaaaaaaataagtaaaattacgttaaataagaaatgtatgtagaattaaaagggaagaaaagattagaggaaatttagaagagggtgagggaagaggaatatttttggtttatggttgggtaattttttgttttatattgaggtaggttttttattattttaggatttcgagaagggattagtttttattttttagtcgttttagaggagtatatttgttgatgatgatttgtaagaggtaaaggtttttaatttttgtttttgaggggttggggatggaggaatatgagagataaatatattttggattatatgttagtaattggaaattattttaattgtttttggttttttttatagttatttagacgtttttagaggaaatttttgtatgagaggttagagagtagagataaggttgggtttatttggtggagttgattgtttgagtttttgggaggtttgggttgtaggagttgggttatagagggaatattgagtttttatagggtttgaggggagaaggtaaaatttttttttgatttttagtttgtatttttttagttttgtgttttttagtgatcgatttcgagaattaggattagatggagaagaggtagagggtttaggggttggtgatggtttttttcgaagttttgattggggttatgaagaacgtagtggtgtttattttttagtttttttttttcgaagtcgtagtcgggatcgtagttatgagaggaatcgggatagagatcgagatcgggagcgggatcgagatcgggatcgagatagagatagagagcgggatagggatcgggatcgggatcgagatcgagatcgggaacgggatagggatcgggagcgggatcgagatcgagatcgagagggtttttttcgtagtgagtgattttggttggaggttaaggtgattttaattgaggtttatgtgggttttattaagtgaaatgtggtatgggttatgttttgtgattatgatttgtgtttttaaagggtcggatttattttttgaacggcgagtttttaggaaagggaatattttttatgtatatggagaagatatgatatttattttttttcgtggggttttttttttttttggaaatattattgatttttttatggatttatttagaaagtaaggatgataatagggtatgatgagaagttttgggagaattttggggtgtgagatttgagggaagaagttgttttttttgtagtcgtttattattattgggt

SEQ ID NO: 2410 - DNA, 7763 bp, Artificial Sequence
  chemically treated genomic DNA (Homo sapiens)
atttagtgataataggcggttgtagggagggtagtttttttttttaggttttatattttaggatttttttaggattttttattatgttttgttgttatttttattttttgggtgggtttatggagaggttaatgatgtttttaaaaggagagaaggttttacggagaagggtgggtgttatgttttttttatatatatagagagtatttttttttttaggggttcgtcgtttagggaatgaattcgattttttgggagtataaattatagttataagatatagtttatgttatattttatttagtaggatttatataaattttagttaaggttattttgatttttagttaaaattatttattgcggaaaggattttttcggtttcggtttcgatttcgttttcgatttttgtttcgttttcggtttcgatttcgatttcgatttcgatttttgtttcgttttttgtttttgtttcgatttcggtttcgatttcgttttcgatttcggtttttgtttcggttttttttatggttgcggtttcggttgcggtttcggggaggggaggttgaggagtgggtattattgcgttttttatagttttagttaaagtttcgagggggattattattagtttttgggttttttgttttttttttatttggttttagttttcgaagtcgattattagaagatataaagttggggagatgtagattgaagattaaaggggggttttattttttttttttagattttgtggagatttaatattttttttatagtttagtttttatagtttaaattttttaaggatttaggtaattaattttattaaatgggtttagttttatttttattttttaattttttatatagagattttttttggggacgtttggatgattgtaaaagagattaagaatagttaagatgatttttagttgttgatatgtggtttaaaatatatttgttttttatatttttttatttttaattttttagggatagaaattaggagtttttattttttgtaggttattattagtagatatgtttttttggaacggttggaaagtggggattggttttttttcggggttttggagtggtgagagatttattttagtgtggagtaggaggttgtttaattatggattagaggtgtttttttttttttatttttttttaggttttttttgattttttttttttttttaattttatatatattttttatttgacgtggttttatttatttttttttttttttttttgagatacggttttgttttgttgtttaggttggagtgtaatagagtaatcgtagtttgttgtagttttgattttttatgtttaagtaatttttttattttagtttttttagtagttgggattagagatgtgttttattatgtttggttaatttttgtatttttttttttttttgtagagatagggttttattatgttgttagggttggttttaaatttttgggtttaagtaatttttttatttcggttttttaaagtgttgaaattaattaggaatgagttattgtcgtatttgttattgtggtttgttttgttttgtttttgagatagaattttgttttgtcgtttaggttggagtgtagtggtgtgatttttatttattgtaatttttgttttttgggtttaagtgattttttggttttagtttttttagtaattgggattataagtgtgtattattatattttgttaattttttttttttttgagacggagtttcgttgttatttaggttggagtgtagtggtataatttcgatttattgtaagtttcgttttttgggtttaagtaatttttttgttttagttttttaagtagttgggattataggcgttcgttattacgttcggttaatttttgtatttttagtagagatggggttttattttgttagttaggatggtttcgattttttgatttcgtgattcgtttgtttcggttttttaaagtgttgggattataggtgtgagttatcgtgttcggttttatattttgttgatttttgtatttttagtagagacggggttttattatgttggttaggttggttttaaatttttaattttaagtgatttgtttattttagttttttaaagtgttgggattataggtatgagttattacgtttagttggtattttttataagtgattcgatatattatgtatttagtttatttgaattttttttgaatttgataatatttttagttttttttattttttagggtaatatattttaagagttttaatttaaggtggattagaattatagaatttgtaaaatggagaatttaggagtcgtttagtttttttattttatatatgagaggtgaaatttagaatggtatagtaatttgttagtgtttgagtatgtatatttttttttaaatttatttatattttaatttggagggatgttttttaaataatttttttgtttgtgtttatttttaatttttttttaagggttcgagaacgtttgaagtttgagtttttggttttagttttgatggtattgatggtttttgattttattagttgttttgtttgttttgttgttgtggttgtgtttatgataggttgttttgatagtgttggagagataaggggaagaggtattatgttggttaagttatgatgaaggttagttttatgttgtttatttttagtttatttttattttttttgttatttatagcgtttgatattattttggttggttgtgttgttgttattttgtttttttagagttagtaatgtttttttttgggaataagggtgagaagagagaggtaagtgagggttagtttttagtcggttttttttttaaggtttttgggtatattattttagggattattttttttgatgtttttagagtggtatattgatgtgttttgttttttgtttttggttttttagattatgtatgatgttggaaatttttaatttaattaaattacggaatttagaggttttttagagtgttatatttttgaagttgaagataaataatttaattatggattagaattttaggatataagttgtaagtaagtataagtttatgtgttttttttggaagttttatttatttattttttgtatattgaatgaggtttagttatgatttcgtaatagggatatttaggaggttaatgtattgtttttatttttaagaagtttatagtttgagaaataaaatatattgagttagtaatataattataagaggtgtagattatttatagttgaaagttagtaagattttttgatgtttaatggttattaaattaggttttttttcgtatttttgtataatatagagaggagaagggtattttagaaaaagaaaatagggtggtaaagatgtagagataagaaggttttgggaatgtattttttggaagtagtgaatagttttattttattagataaggttgttaaattaaggttttgaggtttttttatagataatgtgaagttatttatggtttttgagaaatagagggagtagaattttgtgtttttaatggattatttgaataggagtgaagaagtttgtttaaaaaaaaagattgagaaatttgttgagagattattataatggtttatatgaatgttaataaagttttgttcgggggaatgtatagtgaagaataaataggaaaaattattttaaaagaagaaataataagatttggtaaaggtttgattatgtaaatagtggggaagttagagttttgagtttaaatatgtggtagaattggtgtagttaattttatttggaagattaagaatagaaagatgatagttttaatattgagtatttgaagttttttagtataatattggatagaattggaaaaaataaatttggggattattagtttttaagcggtattaaaagttatgggaaaggaagataatttatggtaaattgtatagaaaagatagaaggtttatattaaggtttgggaaagtttatttttcgaagttatattgtgaggtgatatgtttttaggtatgggttagaaaaatttttttattcgtttatatttattttatatttttttagagtgtagagtttgtgaaaggttaggttatgtttatatatagttttttattttttttttgagtttgttgaattttttttgtagagttttttttttttcgtttagttcggggggtattattaatatggtggtttttagtttaggggtagggtttaagatatttttttttattgttattattcggggtttatacgtcgtttatattgtatttaattttatttttttaggtttgtttatttttgtttttggttttttttattttttgtttaaattaggttgttgtttaagttttcgttggtcgggattatttagtatttttttttgtttttagggattatagatattagtatttttaggtattatgtggtttaaggagggataaatatttatttcgtcggaaagacgatggtattcgatttttttattttcgttagggtaaggataatcgcggggtttgaacggtagagaaggcggtggagttagcgtagcgttcgtagagtaacgtaaagaggaagaatagagaaacggttatgagaaaaagggtcgaagagtgagaagtagagggttttattcgagggggcggtaatcgggggttttacggttttcggtcgcgttcgcgttggtcgttgatagcgggtttataacgatgacgtagcgaggagcggaaaacgcggtaattaaggcggttttaggcgcgtattttcgttcggttttttatcggtttaggtttgttttttcgtagcgatagtttacgttttcggcggggttgtatcggaagttgtttttattttcgttcgtttcggggcggggtttatttcgtagcgattatttgtcgtattttcgggttgttaggtagttgttgtggttttaggatgatggagatagagcgatttggtgagggggaggggagggaaatggaacggagtagtcgatatggaatgaattttgatttttgatttttgattttttttcgtagtgttattttttttagattttttggatttattttttcgggtcgtggagttcggatgtacggggtattgggagttgttgaatttgtttggagttttagagagtagcgtgagtgatttttgattttaatttttgattcgtattgagtttaaattttttttattttttttatagtaggatttagtttaattttgtttatttgtgtttgtatttttgtttattttagtttgaaggggtgttggatagattatagtttagtgtatttgtagtacgtgtgaggatagagtagaaagggttggggatatttttgttttgagagttgtttttttaaatgtggtattttttcgtggagtttttttttgtatttaagtattagggtatttggtgattgagatgataggttttgagtttttaattttttatttttaggtttgggatttttttttttaaaattagtgagtttttaattttagtgtgttttatgattagttagggagttttttaaaaatgtatatttttaggtttagtttttatgtttttgaaatttaaaatttgttttaggtaatttagtagtaggtagtttttggttaagtttgattgttttagtttgtttgatatatttgttatttttgatttgaatataagttttattattttttttgtttgtattttattttttttttttatttaatgttttttattttgtttttgttttagtttttttatggtttttttttttgtgttttagatttgtagtaagaagtagaatagttgtttttgttatttttagtttggttgtttttgtatggtgtggagtatttagttcggtgaggagtttggaggggtttagattagggtgatgggtttttgaaggaagttgggatagaggaagaaagaagatttaaaagttattatttttttttttagaaaatggtagaggaagacggatttttggttttttttggttgttttgggagttttagttttattcgatttataggtttaaagatatttaattataggttagatattgggttataaagaggtaggaggttaggggttatgagaaatagttggggagaaggggaggtggttagagataagtttagttttattggggttttgattttttgttttaggttttgttggagaatataaatttttcggttataatttttttgttttttcgtcggtttttagggttagttttttagtttttatggggaaatttaattcggtattttttttggttaggtgatttttgtggagatgggatggtagaagagggtgtttttaatttttagggaagggttttttatttatttcgtattatttttattttatgaatttttgtttgttttgtttttttttaggggggatggatgaatttattataatagatttgaatatacgggaggaggttgaggaggagatagattttgagaaaggtaaggtggggttttgagtttgagttttgaggaggaagagtttaggttattattgggttattgttagtttttttatgtttttgagaaaattagaaaaagatattttgtttataataatttttattgttatttgttgggaaatttttataataatttttattgttatttgttgggaaagtgttatagtaaatatttttatttatagtatttgttttgtaaatggtattttttaggtttatataatgtatataatttgtttattagtgtgtagtgatttgattttatgtttttattttatagatttttttattattttatttggttttaagaaaggtatggattttgtattaaaaggttagttttagtttttgagtggggtgtaggagaagttatgttttttttttaaggaatagagatggatatgataaggttgattttgttggtttgttttttagattgtttaattttagtttttggattattaagttttagttgtttgttggagtttttggatttgggtgggggtgacgaggatgagaatgaggtagtgggatagttaggaggttttagaggggatattgttttagtttttttttgtagtgtttttttggttcgagtaagtagtttggaagatttagtgttgaaggttggtggttttgtgtagtggaggtaagaaagagttttgttattaggatgtgggttggttaggatgggtttgaggggaagaaagggatattttttgggaggagtgttaattgagagttttttggttgtatttttattattgttatttttgatttttttaggaagcgtttatagttgtatttattttagaggttttagagtttttattttaggagtagtgggttatttttgtggacgttattttttttgttggtgatttttatcgttttattttttagttagttttttaggtattttggttttatttttatacgtttttttatttttttttgggttatatttttagtcgattttttgttttttttattggttagaggttagatttattttaggttagttttggtatttagttttagtttcggttggtttcggtttttattcgttcgttttgcgtgttttatgagtaggaggtagtaaggtttcgtttttttttttagtttttgtttattttttttttttatagtgggtatttgagttagatgtgttttagaaataggttattttgtattt

SEQ ID NO: 2411 - DNA, 11398 bp, Artificial Sequence
  chemically treated genomic DNA (Homo sapiens)
gattataggtattcgttattacgttcggttaattttttttttttttttgtatttttagtagagacgaggttttttcgtgttagttaggatggttttaattttttgattttgtgattcgtttatttcggttttttaaagtgttggaattgtaggtatgagttattgcgttcgattggttgtttttttattttttaaaaatggagtgatataattttttttataaggttttttatgtattagttgatattatatgaatgaaagttttttgtgaagagtaaaatgttttttagataaggtgatagtggtgatggtggtgaagataattgtgatttgtatgatgtgtattgagttagattttatggggtttttggtttatttttttgtttgtttattgagtttgtcgatgttatttaggagatagggatttgatattttttttaggttaatgattgtggttttttgtgttttttttagatttttttattttagtttttttttttgtggtttttttatagattttaggtatgttgttgaaagtgggaattttttatattggtgggtagttggtgattagtggggttgtaagtagtgggaattttgttatatttgttttttattagatgtagtttatttaggttgtggaggtgaggtttttttatttttattttttagtgtgatttttttttttggtttagtattatttgtgtgatgtttttttattttttattttttttgttttatataatgttggtaagtagattattttatttttattatttttatttttttttaggtattgttttttatttattttagagtatagaaggttgtgggttttttagagaaaatatttgagtatttggatcgtatttttcgttgtttatttagtggtttgttgatttttttatatttggagggttttgtttagttttaagatgttttttttgtttatttaaatcgtttagatgttttagtgttataggtataatttattattttttgtattttattggttttaattgtaattttgttattttaaattttttttttgtttttagtttgtttattgttaagtatatattttttttaattttttaaaggtaatggtaggtattatttgttttataaattttttttaaatttaagaatttagtttgggtttttaaagagaatgagagaagaggtttcgaagagagtgtttttacgttttaaggaattgttgtagtaaaatttgtgttttcggttttttattttttttttttttttgtaatttggaatgtgattttttttttttttggtggtatttgatattaagtgtgtggtatagtggtgttgggtttttgtttttgtttttgtcgttttttttatttttattttttggggaggtattatttagaaatttgtgtatgtgggagggtaggagtttttatatttttttgttttttttttggggtaagatattatgttatgtaataaggtaatgatatttttaaggttagaggttttggtagttttttatcgtgtgtttttttggtttttaggggttgatatttattttacgttttggcgaggtgacggcgttggtgggatttaatgggtttgggaagagtatagtggttgttttgttgtagaatttgtattagtttatcgggggatagttgttgttggatgggaagttttttttttaatatgagtatcgttatttgtataggtaggtatggaagtaggtggtttgaaggagggtagggagtattaaatacgaagagtatttttattgagtattttgaaagaggggttagggaatgataagagattttgggtggagatggtggtgtagttaggagggaggtagtatgattttgtgatatgtttttaataaagattttgagttttcgatttttagataattatatttttatgtgttttgttttatgattttttattatattttattttaggtggttgtagtgggataagagttataggtatttggaagaagtttttaagaaaatattgtttatggtttgatttagaagttaattatggaggaaattatagttgttgtagtaaagtttggggtttatagttttatttttggatttttttagggttatgatataggtattttttttatttattttattatttagttatttttatttttgttgaaattttagtagttttgtttttattttttagtttttttttatttatggatattaatttgaagttgtaagattatgtttttatggtttttttattttgatatttttaggattttgtttatttttttagaattttttttatttagttataatcgttagattttggtgtgtgtgagtgcgtgaatgtatgagtgtgtttgtgtgtatgtatatgcgtgtatatatgtggttatatcgtttttattttggttttttgttttgtagaggtagacgaggttgggagttagttgttagggggttagcgataggtagtggcgttggttcgagtattgattcggaaatcgtgtgtatttattttggatgatgttattagtgttttggatgtaaatagttagttataggtgaggtagttatttttttaatggttatattttatttaattttgttttttttatatattttttgttagttttattaatattataattatataaattagtttttgtagtttttagtttttaaatttagttttattggatgtttttttaaggagtagagatagaagacgaggtaaagatatttagaattagttaaaagagattatttataaattatagattgaatttttttttttttttttttttttttttttaagatagtgttttatttagttgtttaggttggagcgtagtggtataattttggtttattgtagttttaatttgttgggtttaagcgattttttttttagtttttcgagtagttgggattataggtgtatattattatgtttggttgatttttatatttttagtagagatgggttttattatgttgtttaggttggttttgaatttttgagtttaggtaatttgttttttttagttttttaaagggttggggttataggtgtgagttattgcgtttagttttatagattgaatttttaaagcgaaatataaggaaaagattatttttataatatcgtttatttaaaaaaattattttttgtatagatagcgtttcgttatgttgtttaggttggttttgaatttttgggtttaagtgattttttttttttgattttttaaagtgttaggattataggtatgagttatcgggtttagtttattttaattatattaatattaattaagttagtttgtttatatgtattgttatttatttatttattaggaatttttttgagttaggtatttattattattttatagatgataaaatggaggttaaaagaggttgaataagttgtttatatagaggttatatagtttttgagtggcgtagttttgatttaaatttaggtttgtttgatttgaatgtttatttttttattattaagttatatttttttaaaatcgaatataaaaatgttaagtttatgggtagagaagaggattatttaatagtttttatttttttgttacgtgttttattttagggtttttatttttattttatttttgtattttttatgtaaaatagtttttaatgaaataaagggtttgcggagaagtatttagaatgggaaacgttggtgtttttggggttgttagtagagttagtagtgattttgtgaggttagttttagttttggaaatataggtgtttttttgggttgagggtagttttcggttttgacggttcgatgtttttttttaggtggagtagtttttgtacgaaagttttgagcggtattttcgtttagtgttttttattatttagtattttagtttggtggagtaggttgattatattttttttttggaaggaggcgttattcgggaggggggaatttattagtagtttatggagaaaaaggggtgttattgggttatggtgtaggtttttgtagatgttttagaatgaaagtttttttagatttgcgtattttatttttttttttttttttttttttgtggtggagaattatagttgtagagtaggtagttgtttttaggatgagttatttgaaatttgttttgagtgtgttattttttttttaagtttttcgtgataatgtagattttttggagtataaatataggatttgtaattttttattgtaacggagtttagagttagggttgatgttttggtgtggttagtattttgaaattgagaaatgtttagaatgtacggaaagatgattagttatttttaatataattgaaggtatatgttggtttataaatattttgtaggtttttgatatttataataaaattggtgttttgtattgtggttttttatgttttcggtatattaaacggtttattgttttttgtagcgtattttttagttgcggatgtttttttttttattatttttaatgttttattttttaattgtattatttttttttttaagttttttaatttttatgaggttttttttattttttttatttttttaggtttatttttaagaatgtgtaagattttagttatagggtttattagggtattagcggtcgtagtttagagtcgtggttttttcgaagtggtagatggggcgggcgcggttagagtaagtgttaggcgggaatagagggattgggcgcgttttataatttattatttcgttcgttggttttttttggttcgtttggttttgaagttgtatttggaggggaaattttagaatagtaggcgggattgtttagtaaatattttttatttagggaggtttaggtcgtgtgacgtcgatagttgttgggtagatgaggttaatataggttgtaagaagaggcggggtttagaggcgtgaaatttcgtagtgtttagttaagtagggagtaacgttaggaagggcgggtagaaagggtacgtttttgtgggtgattataggttaggagatcgttgaatttggaggggttttaggatggatttcgtggaaagatttagagattgcgttttttttttggcgtcgtttttttttatacgcggcgggtatattttgttgtagttggtttaggatttgtttttaagattttgttttttcgtattttcgttttttttggttttgtaaagtgatgtttataggaatttttatttcgcgtgatattatttttagtttttggttgatttttagttttttggttgaagttgcgtttttagatgatacgattttatttatttttgtttttagcggatgttcgggtttggaggtattttttattgtaatttatcgttaagtgggtttttgaaggcgtttgtttttttttcgtttttttcggaagatttttgatttattattttttcgatttttataacgggagagtagagaagtcggtttttagtgtgatggttttggtttaggtattaattgtttttttttcggaaaaggtagggggatgtggaaaagagttttgttttttttttttcgatttgtggttttcgtttttattttttttttcgagagcggatagatttttgggtgttgggcggttatggcgttattagatgtatgcggagtttttcgagggtagcggtcggaatcggttttttcggttgcgggaagcgggcgtcgttcggatttaggatattatagtttttttatgcgatttttagagttcgttttatttcggggaatgtaggtcggggtagtagggaagtttttagggatgtagggaggcgggcgttgaggagtggagggtcgtttgagaggaggaggcgagagcgggagcgcggggtatagggtcgggggtagtttttagtttcggagagcgttagatttaaagaagaggttatatggggatggggtttgagaggaggaagtgtaagttaggataaagagttataggtgaggtgggggtttttaaaggaagataagagaatttttttgtttttgtttatatataaatggtggagttttttttatggggttattatatgatataggaggtgtgtggtgttttgggaaatttatgaaatttgtttgttggtttttttttagtaatttattgttgcgcgatttagaataagttatttagtttaggttttaagttttttttttgtaaagtgaggatattgttattaaacgtgttttgtgagggttgaatgttttatgtatggaagaaattttttaagttatttttaaaattttttagtaatggtaatatgtgtttgtttttatttttgttgtgttggaaaatggaaaaggttgatattggtatgttttttttttttttttttttaagttatttttttttagagattggttattaattgttttatttattgatggttagattatttttgtatatttttttatttttatattttttaaaatttttttttggagttttttattatagaattttttattgttttttttaatttttttttttttattagtttatagaatttttttagtttttgggtggggacggagaaaggaacgtttagattgagatggtttatggtattattacgttcgtttttaagttttagtatggagtgattgtagtagtggattttcgggttttagttgggttttatattagtgagtgtatacgttttagtaggtagaatttggggagttgggtttttttttttataggaggttaattttgtaataaagtggaagtggatattgatttaggatatattgggggatttatggggttatttttttttttttaaagttttatttttttttaggtgttttacgggtgaataaggtgattgagattaatttttatttgtttggtattatgtttggttgtgtagtagattgttagtattgggagcgtttgttggttaaggaatgtaggtaagcgaggttttttattttttttttttagtttagtggttaatttttggattttttagattattgttttttatttttgttttatgtggtttattttagtgttaatagtatattttataaaatagttttttggtgataagattttttttttaaattttagtttgtgttttatttataagttagatagtacgttaggtatttagtattgatatatttattttggcgggatagtattatttattaggttgtttttgtatgttttagatattttaaattttaaatttttttttgatttttagattttataaaataatttttttttaatgtttatttttttaattattttttgttttattaagttggaaagagttaatttttttttttttattttattttgtttttatttaggttgtattatttgcgaaatggagaacgtattttagtgtcggtagtttttaagttgttgtttaatatgatgtgttagtatcggggtatgggtttttttatgggtagtatgatttgtggttgggataagaaggtgggtgttttttattttttatgtttttttattatgttttttatggatgatagatttgttttttattatatatttttattttttttttgataagatgtatggtatatagagtgtttggttatagaattgttttagtatatttatggattatttattggtttagatatgaattattgtatgtgttttgtaagtttgttttttttgttaaatagttgattttaagtttgtttttttttttttatttttaaagttcgatgattttattaaagtggttttttaattttaatgtttttgtggtaatattaatttttttgtttattttttatgttttatatttgaatttttatgttattaatatttttttttttaattttagtttgaaattttttattttatagggttttggattttattacgtggatgaatatgggattcggtttttaggaaatatgttttttacgggtagtgggaatatttatgtttacggggttatggatagtggttatcggtttaattttagttttgaagaggtttatgattttggtcgtagggttattgtttatgttatttatagagatagttattttggaggcgttgttaatagtaagagattaatgtttttattattatgtttgggaggagtcggcgggtggtggggggggtgatttaagattgagaaattagtttggttaatatggcgaaatttcgtttttattaaaattataaaaattagtcggacgtggtgacgggtgtttgtagttttagttatttgggaggttgaggtaggagaattatttgaatttgggaggtggagtttgtagtgagttaagatggcgttattgtattttagtttgggttatagagtgagatttttttttaaaagaaaaaaaagaaaatgattgagagatttaaaggagggagagtagtagggaggaaatttttagagttagaagaagggtattaaaggtttagttatatggttttaagtttgcgtatgtgttttgttgttgtttttaatataatattagtgataggaatttgttgaggtgaaaggtgattttatgttttttttttatttgtttatagtgtattatatgaaggaagatggttgggtgaaagtagaaagtatagatgttagtgatttgttgtattagtatcgggaagttaattaataatggtggtggtggtagttgggtaggttttttttgggaggttttggtcgatttagggatttaagttacgttaagtttaaggagaagaagaggtttagtttgagttaaagagagagtacgggtttagtagttagaggaggtcggtgaagtgtattttttgcgtgttttttatttgaataagtattttttttagggaagtttttgggtgttttattaagtagaataaagaaaaacggttataaatatttttgttttgtggttgaatggggttgggtttgtggttgttgggtggggtagaaagtaaagagacgttttttttggagaaggggtttagatttttatttaagaaatgtggttttattatatagttttttttggggtttttttttatatttatttttttaagattttaggaaggttgtttattgttgtttatggatatttgtttgtaattttatataggttagggttttttttatagagaggtatttggggatttttgtgtgttttattgttaatggtttgaggaatagggagtagggtatttaggataattgtttttgattttatagagtaggatgaaaaagtttttattttattttaatatggtaattatataaatattatattatttattttaaataatattttggagatattggatattgaatataaagatagatattaagggtttaattttatgatgtgttatgttgaattgtaagatggtaggattataattttagaggaagaagagattaggaggatttttttaagtgaggagtgtggggaaaatgtaaaagatttaggttagaagaaagagatatatattatgagattttcggaattatgttggaattatggattatgttattttttagaaaataaaggaaataaatgtttgaaagtaggagtatgagtttgagtatggagttttttttattagagagagatttttaaaatgttagaatgaatagagttgtaaaattttagcgagtttttatttaaaattttttttttttattattattattttaaattttaagtgattttttggtagttatataggtaatattttaaaatggtgatttggaatttaagcgattttttttttggggaatttgtttgtttgtttgtttttagtttgggaggtggttttaatttgaagagttttttttggaataaacgaatttttttgttgtataggaaggttttgggttaggaaggatatttaaaaatttaattattgttttaaatagtgttaaaatagaataagaattaaagtttagtacggggtattttttttataggttgaaggtgcgtttaatataatttggagtatagatttagaggtatttgaatacgcgttagtttaaggtgtttcggttgagaaggacggatgaagatgaacgtttagggtttattaaatttaaagtttgtacgtgaaaattttttttggtttggtgagattggttggaattttttatttaggagagttcggttcgttcgtttaaaattggagtttgtatggaagagggtatttttttttttttagacgaagttttatttttgtcgtttaggttggagtgtaatgattcgatttcggtttattgaaatttttgttttttgagtttaagcgatttttttgttttagtttttcgagtagttgggattataggcgttcgttattacgttttggttaatttttgtatttttagtagagatagggttttattatgttggttaggttggtttcgaatttttgattttaggcgattcgttcgtttcggttttttaaagtgttgtgattataggcgtgagttatcgcgtcggattagaaagaaggtattttttaatagtaggtttagagtttgaagtagtaattttgagaaaatttagtgattttttaattataaagtattttttaattataaagtaaggataatagataaagttgtttttgagataattgtattttatttaatgataaagaaatatttttgtagttttatattttagagtaatcgttattaaaggcgagtgagatttattgtaggtttgtatagtgcgaattagagttcgggttttagtttcgttgtttgcgggtttcgcgcgttttttttcggcggtttagtttagaatgaaggttttggttggggaagcgaaagcgaaagttgttcgagttttgacgttcgttttggtcgagcgtagttggcggattagagtcggtagcgaggttgggagagacggagcggattttagcgttgaagtagaagttttcggagttgcggttttttcgtcgcggttggtgagttggtgcggaggggaatttggagcgttaatagggacgtagtttaagtgattatttattttacgtttttgttttttagtttttttgtattcggcgataggagggagcggagttcggattatttagttcgtcgcggtaggcgggggtgggggtgggggttcggggattttttttttttttttttttaagtacgaggtttttgatggttatgtttttagttttttagaaggtcgaaagttgtttgtcgtaggaggggtgtacggatgagtatcggttatttaggagagtttttagggttgaataggataaaatgagaagtcgatggacgggttaggcggagtcgggcgggtaggagggtagggataaggattgggattttatttttatgattttttatttcgtattcgttgataga

SEQ ID NO: 2412 - DNA, 11398 bp, Artificial Sequence
  chemically treated genomic DNA (Homo sapiens)
tttgttaacggatacgagatgagaaattatgggggtggagttttaatttttgtttttgtttttttattcgttcggtttcgtttaattcgtttatcggttttttattttattttatttaattttgagagtttttttgagtaatcggtgtttattcgtatattttttttacgatagatagttttcggttttttggggagttggaagtatgattattaggagtttcgtgtttaaaaaaaaaaaaaaaaaaaattttcggatttttatttttattttcgtttgtcgcggcgagttaagtggttcgggtttcgtttttttttatcgtcgggtgtagagggattgggaagtaggagcgtggagtgggtagttatttgggttgcgtttttgttggcgttttaggttttttttcgtattaatttattagtcgcggcggggagatcgtagtttcggggatttttgttttagcgttgaggttcgtttcgttttttttaatttcgttatcggttttggttcgttagttacgttcggttagggcgggcgttagggttcgggtagttttcgttttcgtttttttagttaaggtttttattttgggttgggtcgtcgggagggggcgcgcgagattcgtagatagcggaattggagttcgaattttggttcgtattgtataggtttgtaatgagttttattcgtttttagtggcggttattttgggatataaaattgtaaaaatgtttttttattattaagtaaaatatagttgttttaagggtaattttatttgttgtttttgttttgtaattggagaatgttttgtaattggagaattattgaatttttttaaagttattattttaagttttgagtttattattaagaagtgttttttttttggttcggcgcggtggtttacgtttgtaattatagtattttgggaggtcgaggcgggcggatcgtttgaggttaggggttcgagattagtttggttaatatggtgaaattttgtttttattaaaaatataaaaattagttagggcgtggtggcggacgtttgtaattttagttattcgggaggttgaggtaggggaatcgtttgaatttaggaggtagaggttttagtgagtcgagatcgggttattgtattttagtttgggcgataagagtgagatttcgtttaaaaaaaaaaaagtgtttttttttatgtaagttttagttttaggcgagcgagtcgggtttttttaaatagaaggttttaattaattttattaggttaaaggggatttttacgtatagattttgaatttagtaggttttgagcgtttatttttattcgttttttttagtcggagtattttgagttggcgcgtgtttaggtgtttttgagtttgtattttaaattatgttgggcgtatttttagtttatgagggaaatgtttcgtattgagttttggtttttgttttattttaatattgtttagaatagtaattaggtttttaaatattttttttgatttagagtttttttatgtaatagaaagattcgtttattttagaaaggattttttagattgaaattattttttaaattaaaaataaataaataaataaattttttaaaggaagggtcgtttggattttagattattattttgaaatgttatttgtgtgattattaaggagttatttaaagtttaaaatagtggtggtggggaggagggattttaagtaggggttcgttaaagttttataattttatttattttggtattttaagaatttttttttaatgaaaaaagttttatgtttaagtttatgtttttatttttaagtatttgttttttttattttttggaaagtgatatggtttatagttttagtatgatttcgaaaattttatgatgtgtgttttttttttttaatttggattttttatattttttttatattttttatttaggggagtttttttgattttttttttttttaaaattatagttttgttattttgtaatttagtatgatatattatgaaattagatttttaatgtttgtttttatatttaatatttaatatttttaaagtgttatttgggataaatggtatggtgtttatatgattattatattaaagtgaagtggaagtttttttattttattttataaagttaaaaatagttattttaggtgttttattttttgttttttaaattattaataatggaatatataggagtttttaggtgtttttttatggaaaggattttaatttatgtgaaattgtaaataagtgtttatggatagtaatgagtagtttttttgaggttttggagagatgagtgtggaaggaaattttaggaagaattatgtggtgaggttatattttttagataggggtttgagttttttttttagaaaaagcgtttttttattttttgttttatttaataattataggtttaattttatttagttataagatagaggtatttataatcgtttttttttattttatttagtggggtatttagaaatttttttgggggaaatgtttgtttaaatagagaatacgtagaagatgtattttatcggttttttttggttgttgagttcgtattttttttttggtttaggttaggtttttttttttttttggatttaacgtggtttaggtttttgagtcggttaagattttttagaggagatttgtttagttgttattattattattattgattggtttttcggtattggtgtagtaggttattgatatttgtattttttatttttatttaattatttttttttatgtggtatattgtggataaatgagaaaagaatatggagttattttttattttagtaagtttttgttattgatgttatgttgaaggtagtaataagatatatgcgtaagtttaaaattatatgattgggtttttaatgttttttttttgattttgaaaattttttttttattatttttttttttttgagttttttaattattttttttttttttttttgagaaggagttttattttgtggtttagattggaatgtagtggcgttattttggtttattgtaagttttattttttaggtttaagtgatttttttgttttagttttttaagtagttgggattataggtattcgttattacgttcggttaatttttgtagttttagtagagacggggtttcgttatgttggttaggttggttttttaattttaaattattttttttattattcgtcgattttttttaggtatggtggtgggagtattggttttttattattgataacgtttttagaatagttgtttttgtgagtggtataagtaatagttttgcggttaaggttataggtttttttagggttaagattaggtcgatagttattgtttatgatttcgtaggtataagtgtttttattattcgtggagaatatattttttgagagtcgagttttatgtttatttacgtagtagagtttaggattttataagatgaaagattttaggttgaaattggagaggaagatgttggtaatatgggggtttaaatatgagatataaaaagtgaataaaagaattaatattattataagaatattggaattaggaaattattttggtaaagttatcgaattttagaaatgaaaaaggaaaaataaatttgaaattaattgtttaataaaagggataagtttataaaatatatgtaatgatttatatttgggttaataaatagtttatggatatattgaaatagttttataattaagtattttatatgttatgtattttgttagggagggagtaggagtatatgatgggaaatagatttgttatttatagggaatatggtgggggaatatgaagaatggagagtatttatttttttattttagttatagattatattgtttatagagaggtttatgtttcggtattggtatattatgttggatagtagtttggaggttgtcgatattgaaatacgttttttatttcgtagatagtatagtttgggtgaggataaggtggagtgaggaaagagaggttagttttttttaatttgatggggtaggaaatgattaaagagataagtattggaaaggaattattttgtaggatttaaagattagagaaagatttggaatttaaagtatttgaaatatataaaggtagtttagtaaatgatattgtttcgttagggtggatgtgttagtgttaaatatttgacgtattatttggtttatgagtggagtataggttgagatttgggagaagggttttattattaaaaagttgttttgtgaaatatattattagtattaagatggattatataggataagagtaaggagtaatgatttgagagatttagggattaattattaggttaagaaaggaagatgagaggtttcgtttatttgtattttttggttagtaggcgtttttagtattgatagtttgttgtatagttagatatggtgttaagtaggtaagggttaattttaattattttgtttattcgtaaggtatttggaagaagatggagttttgggagagaagggatgattttatagattttttagtgtgttttaaattaatatttatttttattttgttgtagagttggttttttgtggaaaggagagtttagttttttagattttgtttgttggagcgtatatatttattaatgtaggatttagttgaggttcgagaatttattgttgtaattattttatgttggaatttgaaggcgagcgtggtggtgttatgggttattttaatttgaacgttttttttttcgtttttatttagggattggaagaattttgtgggttgataagagaaaagaggttgagaaaggtaatgaaaaattttgtagtaagaggttttaggaaaaggttttagggagtatgagggtgaggagatatgtagaaatgatttaattattaataaatgaaatagttaataattaatttttagaaggaaatggtttgggagaaggaaaagaagaggtatgttagtattaattttttttattttttagtataatagaaatgaaagtaagtatatgttattattattaaaaaattttgagagtgatttaaagggttttttttatgtataaagtatttaatttttataaaatacgtttagtaatagtatttttattttatagaagaggggtttgggatttagattaagtgatttgttttaagtcgcgtaatagtgagttgttgagaggaggttagtaggtaaattttataggttttttaagatattatatattttttatattatgtgataattttatgaaaaaggttttattatttgtgtgtggataagggtaggaaagtttttttgtttttttttgggagtttttattttatttgtaattttttgttttaatttgtattttttttttttaggttttatttttatgtggttttttttttgggtttggcgtttttcgggattgaaggttattttcgattttgtatttcgcgttttcgttttcgttttttttttttaggcgattttttattttttagcgttcgtttttttgtatttttaggggtttttttattgtttcgatttgtatttttcggggtaaagcgagttttggagatcgtatagagaaattgtagtgttttgggttcgagcgacgttcgtttttcgtaatcgggagagtcgatttcggtcgttgttttcggggggtttcgtatatatttagtagcgttatgatcgtttagtatttagagatttgttcgttttcggaggaggaagtgaaagcgaaagttatagatcgaaggggagggaataagatttttttttatatttttttgtttttttcgagaaaaggatagttagtgtttggattaggattattatattggggatcggtttttttgttttttcgttatgggggtcgggggaatgatgggttaagggtttttcgaagaaagcgagaaaggaataggcgtttttaaaagtttatttggcgatgggttatagtaagaggtatttttaggttcgggtattcgttggaaataggggtgggtagggtcgtgttatttaaaggcgtagttttaattagaagattagaagttagttaggagttgggagtagtgttacgcggggtgggggtttttatgagtattattttataaaattaggagggacggaagtgcgagggggtagagttttggaaataggttttgggttaattgtaatagaatatattcgtcgcgtgtaggggaaggcggcgttagggagagggcgtagtttttgaatttttttacggggtttattttagggtttttttaggtttaacggttttttaatttgtagttatttataagagcgtgttttttttgttcgttttttttagcgttgttttttgtttggttgagtattgcggagttttacgtttttaaatttcgtttttttttgtaatttgtgttggttttatttatttagtaattgtcgacgttatacgatttgggtttttttgaatgggagatatttattaggtaatttcgtttattgttttgaggttttttttttaggtgtagttttagagttaggcgagttaggaaggattagcgggcgaggtggtgagttgtgaggcgcgtttagtttttttgttttcgtttggtatttgttttggtcgcgttcgttttatttgttatttcggagaggttacggttttgagttgcggtcgttagtgttttgatgggttttgtggttggggttttgtatatttttgggggtgggtttaaggggataggggaagtggaaggggttttataggaattaaaaagtttaagggaaaaggtgatgtagttagggggtaaaatattgaggatgataaaagaggagatattcgtagttgaaaagtgcgttgtaaaaggtagtgggtcgtttggtgtgtcggaaatataagaaattatagtataaaatattaattttattataaatattaagaatttatagggtgtttatgggttagtatatgtttttagttatgttgaaaatagttgattattttttcgtatattttgaatattttttagttttagagtgttggttatattaaagtattagttttggttttaaatttcgttatagtaaggaattataaattttgtgtttgtattttaggaagtttgtattattacgaggagtttggaaaggaggtaatatatttaaggtaaattttaagtaatttattttggaggtagttgtttattttgtagttgtggttttttattatagagagaagaaaagggagggagatggagtgcgtaggtttgagaaggtttttattttggagtatttgtaggagtttgtattatggtttagtagtatttttttttttttatgagttgttggtgggtttttttttttcggatagcgtttttttttagaaagaggatgtggttagtttgttttattaggttgaggtgttgggtgatgagaagtattgagcgggagtatcgtttagggttttcgtataggagttgttttatttgaggaaagatatcggatcgttagagtcggggattatttttagtttagggagatatttgtgtttttagggttgggattgattttataggattattgttggttttgttaataattttaaggatattaacgttttttattttgagtattttttcgtaaattttttgttttattaaggattgttttatatgaagggtgtaaaagtaggataaaaatgagaattttagggtgaaatacgtgatagaagaataaagattattgaatagtttttttttttatttatggatttggtatttttatattcgattttaaggaaatataatttagtagtaaagagatgagtatttaagttaggtagatttgaatttgggttaaggttgcgttatttaaaagttatatgatttttatatgagtagtttatttaattttttttaatttttattttgttatttgtagaatgatgataaatgtttagtttagaaggatttttaatgaataaatgagtgatagtgtatgtaaatagattagtttaattaatattaatatgattaggatgggttgggttcggtggtttatgtttataattttagtattttgggaggttaaggagggaggattatttgggtttaggagtttaaggttagtttgggtaatatagcgggacgttgtttgtataaaaaataatttttttaaataaacgatattatgaggatggttttttttttatgtttcgttttagaaatttagtttataggattgggcgtagtggtttatatttataattttagttttttgggaggttgaggggggtagattatttgagtttaggaatttaaggttagtttgggtaatatggtgaaatttatttttattaaaaatataaaagttaattaggtatagtggtgtatatttgtagttttagttattcgggaggttgaggggagaatcgtttgagtttagtaggttgaagttgtagtgagttaagattgtgttattgcgttttagtttgggtaattgagtgagatattgttttaaaaaaaaaaaaggaaagaaagaaagaaatttagtttgtagtttgtagatagttttttttaattgattttaggtgtttttgtttcgttttttatttttattttttggggaggtatttaatggaattggatttgggaattgagaattgtaaggattggtttgtataattatgatgttagtaaaattaatagaagatgtataaaagaagtaagattgggtgggatatagttattaagaagatgattgttttatttgtaattggttgtttgtatttagggtattggtggtattatttaggataagtatatacggttttcggattaatgttcgggttaacgttattgtttgtcgttgattttttgatagttggtttttagtttcgtttatttttgtagagtaaagggttaagatgagaacggtatagttatatgtgtgtacgtatgtatatgtatatagatatatttatgtatttacgtatttatatatattaagatttgacggttgtagttggataggggagattttgggaagatgaatagaattttgaggatgttaggatgaagaagttataggagtatgattttataattttaaattgatgtttatgagtaaggaggaattgaaggataaaggtaagattattggggttttagtaaaggtaaagatggttgggtggtgagatgagtggagagagtatttgtgttatagttttgagggagtttagagatgaaattatgggttttagattttattgtagtagttgtgattttttttatagttggtttttgggttaggttataggtaatatttttttgaagattttttttaaatatttgtggtttttgttttattgtagttatttgagatgaaatatgatgaagagttatagaataaggtatatgggagtatggttatttagagatcgaagatttaaaatttttattgagaatatgttataaaattatattattttttttttgattatattattatttttatttaaggttttttattattttttaattttttttttagagtgtttagtaagaatgtttttcgtatttgatgttttttgtttttttttaagttatttgtttttatatttgtttgtgtaggtagcggtgtttatattggggaaggggttttttatttaatagtagttgtttttcggtgggttggtatagattttgtagtagggtagttattgtgttttttttagatttattgggttttattagcgtcgttatttcgttagggcgtagggtgaatgttagtttttagaggttagagaagtatacgataagaggttattaaggtttttaattttgagagtgttattgttttgttatatagtatgatgttttattttagaagaaaaatagggaaatatagaaatttttatttttttatatgtatagatttttgggtgatgtttttttaaggagtagagatagaagaagcggtaaagataagggtagagatttagtattattatgttatatatttgatgttagatattattaggaaagggaaaaattatattttaaattataaaggaaaaggaaagatggaagatcgaagatatagattttgttgtagtaattttttggaacgtgagagtatttttttcgaaatttttttttttattttttttggaagtttaaattgggtttttgagtttggggaagatttatggaatagatgatgtttattattgtttttaaagggttagggaggatatatgtttggtagtaagtaggttgaaggtaggaagaaaatttaggatggtagaattgtagttggggttagtggaatatagggagtggtaggttgtatttgtagtattaagatatttgggcggtttgggtaggtaaaggagatattttggaattggataaggttttttaagtgtaagggagttaatagattattgggtgggtagcgaggggtgcggtttaggtatttaaatattttttttgaggagtttatagttttttgtattttggggtagatggagagtagtatttagagggaggtaagaatagtgaaagtgaggtagtttgtttgttagtattatgtgaagtaagaagggtaaagaatggaaggatattatatagatggtgttgggttagaggaaggaattatattggggagtgaaggtggagggattttatttttatagtttgggtgaattgtatttggtagagaataaatgtgataaggtttttattgtttatagttttattggttattagttgtttattaatgtagaggatttttatttttagtagtatatttgaaatttataaagagattataaaaaaagggattgaggtagagaaatttggaggggatataaagaattatagttattaatttgaaggaaatattaagtttttgttttttaagtgatatcggtaggtttaataggtagataggagaatgaattagagattttatggagtttgatttaatgtatattatgtaagttatagttatttttattattattattattattattttgtttggggagtattttattttttataaaaggtttttatttatgtgatgttagttaatatatgaagagttttataaagaaggttatattattttatttttgaaaaatgaggaaataattagtcgggcgtagtggtttatgtttgtaattttagtattttgggaggtcgaagtgggcggattataaggttaggagattgagattattttggttaatacggagaaatttcgtttttattaaaaatataaaaaaaaaaaaaaaattagtcgggcgtggtggcgggtgtttgtagtt

SEQ ID NO: 2413 - DNA, 6988 bp, Artificial Sequence
  chemically treated genomic DNA (Homo sapiens)
tttgggggaaaggggaagagtgagtttcgtttagatttttttaatatattttagttttggagtttttgaattgggttgggttgcgagttcggggtaagttgggagtgcgggacgaacggtttgagagtatagacgtgtagtaaggggcggtggtcgcgcggcggggtataagcgagtatcgttcgggtacgtgttaagaagggaaggggtcgggcgtttaatggtcgcgaggttttcggaggaggtcgtagagggggtttagcgagggcgtatttggcggtaacgtattttgttgaggtatcggcgaggggtaggagaggcggtcgcgggagttggcggtcgtagaaattttagggtcgagagtcgcgttgtcggcgtttacgtgattttttttttttttatttttttatttttttatttttttattttatttttcgttttttgcgcgttattttaatttggggtttcgttaggttagttttaaagggttaggcgggtttcggttgggtttcgttttcgagtcggaataaaataggaggcgtggtttttcgagggggcggttattttttcggtttttagggatatttagggaggtttttgtattggtagttcgttattgtgcgggtttcgggttttattcgtaatttagaacgtgatagcgtaggacgttttattttttttgaaagttttttttgagtcgggtgtttgttttgtacgttgttaggtggttttttagtatggtttgttaggttttcgatttgtttagtgttggttaatttttagcgtatttaattttttaaatatgtcgagggaagtggtattttgtcgttgttgaattcgttattttttagtttttggtggttttgggagtttttagtattggcgattgttttttttttgtagttttcgtttatgtttttgattcgttgtttttttttggtatatatagtattttggggattagaaatttcgagttgttatttgattagattcgttaatattttattttatggtttgggtttttggcgtcgtgtttaaaaagtttttgttttttattcgagtgatagatattttttattagttttttagttttgttttgtatatataagtttttgttaagtttattttagattattttacgtattttgagttagtttttttaatatcggttgttaagtaatttttattttatagatgaggaaattgggatttttggggagaaaataatttgtttagagttatagggagggtggttgtggttgttttttgggatagatttgaattatttgcgtatattatattatttttttaattcggaagttgagggatttgagcgagttggtttatttggaattgggaaggtgcggtttagcgtaggggttttgtatgggtttttgttgttatttataggttatttataggattgtaggtattaggatttcggttttatttagaggcgttttttagttattttatttttggtttcggaatttaggtttagtgagcgttttttttttagtttttttggttaatatacgtatatttacggatttttgggttgtatgtgtaggtttattagagaagtagtttttggaaagatgattttttgttaatgaatgagtgaatgagtgattgaaagggtgttataatttattagtgggtatttattgtgtgtagatgttgagtggagatggggttggggttttgtttttattttttttaggtaatttttaagttagtagtgtttagtgaagtaggaggttttagataatagttttagttggttatagtgaatattttttgtagattagatgttgggaatgtgttttttttgtaattttttgattttatagagtttagaggaggttatattattttttttgttttatattatagatatataggatagaaaagtttagagaggttaagtgatttgtttgaggttagtagttgttatgatagagtttttattttaattttaaagtataattttagggttgggtttttatttttaaattatggtttttttttttagttttttttggttttttatatagttatatgtgtaaatatatttttatatatgtatatatgtagttatatttttatatatgtgtatatatatgtatataatacgtataaatatatatgtatataatatatatgtatatagatatatatgtatatgtgtatatatatatgtatttatgtttagttggatttaggattgatgtttttgagtttaatttgagaatttgatttaagattttagagtttttttgaaagttttatgatttggaattttttattgttggggggagttaaagaaggttttttgttttttgaaggtaattagtttgagtttggtgaatttgaggttgagtaagatgttattttggtgagtagaaggttaggtagttgagggtggaggttggttttttgttttagttaaaggtattttattgaatgttttgtgaagatgttttttttttttaaaatggaattagattataattgttttataaattttataattgtattttttaagttggttttttttattaaaattttaagttgtataagtaaaatttttttattgtaattaatttaaattatatagaagtatgaaaagtaaggtaaaggtgttgtttttttttttttagtttttataattagtgtttatgtttttataggtatacgtattttttatatgggtttatcggagagatgttttgaaattatttatttagtttaggaaagttagaatatgtggttttttttagtgtttatgttttagtaattatttgtagtattttttttataatgatgggaggatttggtatgtaggatggttaggtttggttaggagtgggtttatgatggtagattttgttatatagttttttatgtagttgtgtgtttaaggggatagagattttggaatagtttaaagtgaggggggttaaattttatatatatatatatatatatatatatatatatatatatatatattttgtttttattggagaggggaggttgtatatggtgagaggatggaggttaaatgagcgagatttttgggaaggtattgttgtgtatttttgtgatttattttgtgattgttttgggtagggagtggtaggggaattttgtagtaagtttaatttttggggtgtaggagagggattattttagaagagaagaatttatggaaatttggttagtgagggtatgagagggggtatcgttaggtggtagtgtgggtttagtaattagagttagggtttttagggagtagttagggtaggagaattaagtattaagttggttagagggatttaatttagtatttggggtagaataggggtatattattgtttttagtatgtaggtgaggtgtatagtgttgttatatttatatatatataaaaatagttggaaggttaaaatttttggaattttttggtttatatatagattgtataattattgatttgtaggagatatttttaaagggatatttatggtgttttgatatggataggtttgggggtagagaagttttattgaggattttaaagttggatgtttaggagtcggtagattattagtatttatagaggaagtaggaggaagtgtgtaggtttttggtttaaattattatttgttagttgggagatttaagttatattgtaatttttttatgttttagtttttttatttgtaaagaggagataatatgtggtagttgtgataatgatatgaggttgtaaattgttgagagtgtttgatatatagtaagtgtttagttgaatagttatggtgagggggaagaagtatagttttggtagagagtttgggatttggttttataagagatttaagtttaaaattgtaattttgttgtttggtagcggtaaagtttttttgtttttatagtaatgagatagtggatagtttttattggtaagttagtggtttatataggggtcgtatattaggttatttaggtattttagtttttaaagtgggttataaggtatttattttcgttatttttattttaagaaagtggtttttggttaatttaggagggggttggtagagttgtatttatgaagttcggtttttttttaggaaagttatagagaagtgattgttttgaaatttgaaatttaacgttttttttttagttttatagggttttgtttttaggttttttttgttttttgttattttgggtagagtaaattgagttttgttttttttggatgttatcgtttaggttttttaataaggttaggggtttgttatttttgtttaggattttagagttagatttttttttggggattttgggggtatatattgggagggggatgggggtggggagtggattttgtaatttttttaaattttatagtttttttggtttaagggtttggaggagatttatagattttatagttttttaagatgttttatagtgaatttagtgaattgaaaaaaggtggagagggttttggtaggagcgtgggtttttgatttagagttgggattaagtttttattttgttattttttagtatttgttttttggggttgttttttgttcgtataacgggagtaatattagttgtagaggattaaatgtagtaagtattttttgtagataagagcgagtgttattattttgttttcgttatttcgttttaatttttattattttatttttagattatttttttatgttttgagttgtaggatttttttttagtattttttttttggcggggggtgggggtggtattaatttagagttcgggttatttggggttgtttttgtttgtttttttaaatttgtagtttttttttttttgattggtagggtcggttagaaattagtgttagttaagattggatggtttgtttgattcgaaaagttggggcgtgtttttttttttaatttttttaaagaaaacgtttttgtttggatttttttggttgtggtgatcgtcggtttgattttagtggatttatttatttttggaattgttttttgtatttcgttttgttttaagtttcgttttagattttattttatgttatttaattcgatattcgatatatagagttttagggtttaggagcggtcgttttaatacggggcgtttgtatacgtcgatagatttttttggaggagtcgttcgtagggaggataagttcgggatttcgtttttcgttttgttacgagttttatcgcgagataagagggtttttttttaacgacgtagaatgttagaaggtaatttgggcgcgggttgttgagttcgggtttttttttaattttttcgattcggtttttttttattgattttttcgatttgtttttttgggtagttttagtttcgggtttacgcgttgttattggtttttttcgatcgtacggttttatttttagcgtcgcgattggttagttcgcggggtttcgtttcgtttttttggaaagtttttggaaatttgttaaagtatttttttttattgtttagggttttagattcggcgacggggttttcgtatttcgttcgggttttatcgtttagttcgcggttttaggaagacgttgttttcgggaagggttggaacgcggtagataaaggattaggtagtagttcgtttcgtttcgttcgtttggttcgtttttttcgttttcgtaggcggttcgcgttattgttttttagtttttgttttgcgttcgcgcgtttcgggagtttatttagtacgcgtttcgcgtttattggttttttttagtcgtcgtcgtttagtcgagtttttatttcggagtcgtcgttgtcgcggggatatggttttttgcgtttaggggtaagcgcggttttttgtttttttttcggttattacgaggggcgtacgggagaataggggtttcgtgttagttgtcgggtattgggagggtttgacgggttagaggtgattgagcgtagacggattttaggagtaaggttttgtgtggggttgtgatatttttatttttcgtttttatatatttattttaatttttattgtggattgggaaatcgggggttggtcggttaaaggaggaatttatagggtgggtttagtttgggtttttattggagtagatggatgttaacggtacggcgttttttaagatgtggttaataattttagatatttttttgggtttagagtattttacgttagtttgtttgttgttttgtttgttagtaattttggattagtttttggttttttttgttttggtgtttttttttttgttttaggttagtaagtaggttttttttgggaagttagtcgtagatttttgtttttttttaggttggttatttgatggtttgtaattttcgggaggttttgggtttggtttggttttgtttggggtatttttataatcgttttataattttgttttagtttagtttgggattttaatgtgagaaggattttggtttttgttttttatttttaaattttttagatttgaggtaagggatagtggagaggggatgttgataagatagagttttgatttgagttgagtatttttggttatttattttgttttgaattttagtaatttttttaattaaagggtttgatgttggttatggtgatgtgataggagtttaggaagttttaaggagagaggaagaaggtataaatgggtgttttgtatttagggaggattgggtggttgtgtttatcgtaattggtttggtgttaagtgagggagggtggaaggtgaggttaaggaagaggatatggaggtgttgggaagattattttttttttgttgtttttagtaagttttttttttttgtttgtattttgggatttttgaatatttgttttattattgttttttattttaggagtttttttttgtatttcggggttttatagttttttttattttttattttagg

SEQ ID NO: 2414 - DNA, 6988 bp, Artificial Sequence
  chemically treated genomic DNA (Homo sapiens)
tttagggtaaaaagtgaaagaggttatgggatttcggaatgtagggggaggtttttggggtggaaggtagtggtggggtaggtatttaggagttttagaatgtagataggaggaaggaatttgttggagatagtaagggagaagtagtttttttagtatttttatgtttttttttttggttttattttttatttttttttatttggtattaggttagttgcgataagtatagttatttagttttttttgagtgtagaatatttatttatattttttttttttttttttggagttttttgagtttttgttatattattatggttagtattagattttttggttgaaggggttgttgaggtttaggatagagtggatggttaggaatgtttagtttaggttaagattttgttttattagtattttttttttattgttttttattttaagtttgggaaatttgaagatgagaggtaggagttaaggttttttttatattgggattttagattgggttgagatagggttgtgagacgattgtgggggtattttaagtaggattaggttaaatttagggtttttcgagagttgtagattattaggtggttagtttgaggaaaggtaaggatttgcggttggttttttaagaagagtttatttgttagtttggggtaggagaggggatattaggatagagggggttaggggttggtttaaggttattagtaggtagggtagtaggtaggttagcgtagagtgttttgggtttagaagaatatttgggattgttggttatattttgggggacgtcgtgtcgttagtatttatttgttttaatgagaatttaggttgagtttattttgtgagttttttttttagtcggttagttttcggttttttaatttatagtgggaattgaggtaagtgtgtgggggcggggagtgggagtgttatagttttatatagagttttgtttttgaggttcgtttgcgtttagttatttttggttcgttaagtttttttaatgttcggtagttagtacgaagtttttgttttttcgtgcgtttttcgtggtggtcgggaagggggtagagagtcgcgtttatttttgaacgtagaggattatgttttcgcggtagcggcgatttcggagtggggattcggttggacggcggcggttggagggaattagtgggcgcggagcgcgtgttgggtaggttttcggggcgcgcgggcgtaggatagggattgagaggtagtggcgcggatcgtttgcgagggcgaggggggcgggttagacgagcggggcggggcgagttgttgtttaattttttgtttgtcgcgttttagtttttttcggaagtagcgtttttttagaatcgcgggttgagcggtggggttcgggcggggtgcgggggtttcgtcgtcgggtttggggttttgagtagtgaaaggaaatattttgatagatttttaagaattttttaggaaaacggggcggggtttcgcgagttgattaatcgcgacgttgaaggtggagtcgtgcggtcggggagggttaatagtagcgcgtggattcggggttgaagttatttagaggggtaggtcggagagattagtggggaaagatcgggtcggggaagttaaggaggggttcgggtttagtaattcgcgtttagattgttttttggtattttgcgtcgttggggaagggtttttttatttcgcggtggaattcgtggtagggcggggggcggagtttcgggtttgttttttttgcgagcggtttttttaaggaggtttgtcggcgtgtgtaagcgtttcgtgttgggacggtcgtttttggattttaggattttgtgtgtcgggtgtcggattgggtggtatggggtgagatttggagcgggatttagggtagggcggggtgtagaggatagttttagaaatgagtgggtttattgaggttaagtcggcggttattatagttagaaagatttagataagaacgttttttttgaaagagttgaaggagaaagtacgttttaatttttcgaattaggtagattatttagttttggttggtattggtttttggtcggttttgttagttaggggagaagagattatagatttgagaaagtaagtagagatagttttagatggttcggattttgggttggtattatttttatttttcgttagaaaaaaaatgttgagagagagttttgtaatttaaaatatagggagataatttgggagtagggtgatagaggttggggcgggatggcgggggtagagtagtaatattcgtttttatttatagggagtatttgttgtatttgattttttataattggtgttgttttcgttatgcggatagaagatagttttagggaataaatgttaggaaatggtagggtaagagtttggttttagttttgaattagaagtttacgtttttattaggattttttttatttttttttagtttattggatttattatggagtattttgaaggattgtagggtttgtgaattttttttaaatttttgggttagaagaattgtgggatttggagaggttgtagggtttattttttatttttattttttttttagtgtgtgtttttagggtttttagaaaggagtttagttttgagattttgggtagggatgatagatttttggttttgttgaagggtttgaacgatagtatttagggaagatagggtttagtttgttttgtttagaatggtagagggtaaaagaaatttgaaagtaaaattttgtgaaattggggaaaaaacgttaagttttagattttagggtagttatttttttgtagtttttttgaagggaagtcgggttttatgagtgtaattttgttagtttttttttgagttggttagaagttatttttttggaatgggggtagcggggatggatattttataatttattttgagggttgggatatttggatagtttgatatgcggtttttgtgtggattattgatttgttagtaggaattgtttattgttttattattatgaagataaaaggattttgtcgttgttaggtaatagagttataattttgaatttgggttttttatggggttaaattttaagttttttattaaaattatatttttttttttttattatgattatttaattgaatatttattatgtgttaagtatttttagtaatttgtagttttatgttattgttataattattatatattattttttttttataggtgagaaaattgaggtatggagaggttataatataatttagattttttagttggtaagtaatggtttaagttaggagtttatatatttttttttattttttttatgggtgttggtgatttgtcgatttttagatatttagttttaaggtttttagtgaagtttttttgtttttaggtttgtttatgttagagtattatgggtgtttttttgaaagtattttttataggttagtgattatgtagtttatgtgtaaattaaagggttttaagggttttggttttttaattatttttgtgtgtgtgtgaatatgatagtattgtgtattttatttgtatgttgggaatagtgatgtgtttttgttttgttttaagtattaagttgggtttttttggttaatttagtatttaatttttttgttttggttgttttttagaaattttggttttgattgttgggtttatattgttatttagcggtgtttttttttatgtttttattagttaaatttttatagattttttttttttaggataattttttttttgtattttagggattgaatttattgtaagatttttttgttattttttatttagaataattataagatgaattataagaatatatagtagtgtttttttaaaagtttcgtttatttggtttttatttttttattatgtatagttttttttttttagtaaggatagagtgtgtgtgtgtgtgtgtgtgtgtgtgtgtgtgtgtgtgtgtgtaggatttagttttttttattttaagttattttaaagtttttgtttttttggatatatagttatatgaagggttgtgtggtagagtttgttattatgaatttatttttgattagatttagttattttgtatgttaaatttttttattattgtggaggggatgttgtaggtggttgttggaatatgagtattaagggaaattatatattttgatttttttgggttaagtgagtagttttaaggtattttttcgatggatttatgtggggaatgcgtgtgtttgtggaagtatggatattggttatagggattgggaggggagaagtagtatttttgttttattttttatatttttgtataatttgaattaattataatgaggaagttttatttatgtaatttaaaattttaataaaagagattagtttaaaaaatataattataaaatttgtagagtaattataatttaattttattttaaagaaagaagatatttttatagaatatttagtgggatgtttttggttggggtaaggagttagtttttatttttagttgtttagttttttgtttattagaatgatattttgtttagttttaggtttattaggtttaaattagttgtttttagagagtagagagttttttttggttttttttagtagtagaagattttagattatagggtttttaaagaggttttgagattttgaattagatttttaggttgggtttagggatattaattttgggtttagttgggtataaatgtatgtgtgtgtgtatatgtgtatgtgtatttgtgtgtatgtgtgttatatgtatgtgtgtttatacgtgttatatgtatgtgtgtgtatatgtgtaaaggtgtgattgtatgtgtatatgtgtgagagtatgtttgtatatgtggttgtgtgaggagttagaaaggattaggagaggaggttatggtttgaggataagagtttagttttgaggttgtgttttggagttggaatgggggttttgttatgatagttgttgattttagataggttatttaatttttttgggtttttttgttttgtgtgtttgtagtgtggggtagaagggatagtgtgattttttttaggttttgtaaggttagggggttgtagggagagtatatttttagtatttggtttgtaagaagtgtttattatggttagttgaggttattgtttggagttttttgttttattgaatattgttagtttgaaggttgtttgaaagaaataggggtagagttttaattttatttttatttaatatttgtatatagtgggtatttattaataagttgtagtatttttttagttatttatttatttatttattgatagaagattatttttttaagagttatttttttgatgagtttgtatatgtagtttaggggttcgtgagtgtgcgtgtgttaattagaggggttgagggggaggcgtttattgggtttaaatttcggagttaagagtaggatggttggaagacgtttttgagtggaatcgaggttttggtatttgtagttttgtagatggtttgtagatgatagtagaggtttatgtagagtttttgcgttgagtcgtatttttttagttttaagtgagttagttcgtttaggttttttagttttcggattgggggagtgatgtgatgtgcgtaagtagtttagatttgttttagaagatagttatagttattttttttatggttttagataagttgttttttttttaggggttttagtttttttatttgtgaaatgagagttgtttaatagtcggtgttgggaaaattggtttaaaatacgtaaggtagtttaagatgggtttaatagagatttatatgtgtaaggtaaaattagaaagttaatggagaatatttgttattcggatgggagatagagattttttaaatacgacgttaaaagtttaaattataaggtgaaatgttggcggatttgattaaatggtaattcgggatttttggtttttaggatgttgtatatattaaagggaagtagcgagttaagggtataagcgggagttgtaaaaagggggtagtcgttagtgttggagatttttagagttattagagattaaagagtggcgaatttaataacgataagatgttatttttttcggtatgtttaaaaagttgagtacgttgagggttggttaatattaggtaagtcggaagtttagtaagttatattggagggttatttggtagcgtgtagagtaaatattcgatttaaggagagtttttaagagaaataagacgttttgcgttgttacgttttaggttgcgagtaaaattcgggattcgtatagtagcggattgttagtataggggtttttttgggtgtttttggaaatcgaggaagtaatcgttttttcgggaagttacgttttttattttgtttcggttcgggggcgggatttagtcggggttcgtttggttttttaaggttgatttagcggggttttaagttgggatgacgcgtagggagcggggggtggagtgggggagtgggggagtgggggggtgggggggggggaggttacgtgggcgtcggtagcgcgattttcggttttgggatttttgcggtcgttagttttcgcgatcgttttttttgtttttcgtcggtattttagtaaggtgcgttgtcgttaggtacgttttcgttgggttttttttgcggtttttttcggggatttcgcggttattaggcgttcggttttttttttttttgatacgtgttcgggcggtgttcgtttgtatttcgtcgcgcgattatcgttttttgttgtacgtttgtatttttaggtcgttcgtttcgtatttttagtttgtttcgggttcgtagtttagtttagtttagaggttttaaggttggggtgtgttggaaaagtttgggcgggatttatttttttttttttttttagg

SEQ ID NO: 2415 - DNA, 9899 bp, Artificial Sequence
  chemically treated genomic DNA (Homo sapiens)
ttttaggatgttagcggttggggtatgaagtatttttaagggaaagtgtatgggagtgaagtttgtaggtttttttggttcgggtgtttattggcgtatttaaattgtaggtgataattgttaagaatgtgatatttttattttagtatgtttttagttatgagagaggtatcgagttaaatttttttattttaaaagatgataattaaagtatatgtgtataatttagtaagttagtgaatgtattcgtttttttattttgaaatttaggatattttttttattttatgttgaatttagattaagtattaagtttatgagtatattaggtgtatttataggaggtaggagcgttggttttttatttaattgtattttttttgattatttttgtagaaatattttcgttttttttttattttttttgagattaattttatataaatattattttaaggttatttttttaggtgttaaattttttttgtatttttaggttaaatttaattagtattaataaattttatttttttgtgtgtgtgtgtgagacggagttttgttgtgatgtttaggttagagtgtaatggcgtgatttcggtttattgttattattgttttttgggtttatacgatttttttgttttagtttttttgggattataggtacgtattattacgtttagttaatttttgtgtttttagtagagatagggttttattatattggttaggttggtttggaatttttgattttaagtgattcgtttattttagttttttaaagtgttgggattataggtttgagttattatttttggttagaattaagaagttttattggaggatattatttgtttaatataaatggattatattataatagttatatttttgtaaaatttgtttttattggaagtaaaaatgttattttattttagacgttatgggaaaaataatttatgtagattttattgatttttaaataaaggaataaaaggtattatttgaattttaaagtttatttattttgaagtaattaatttaaaaaatggtttgagttaagtgtattaaaaagaagaaatagtcgtaagatggtagtataaatttatttttgtatgtagaaatcggaaaaaaagtaagtttagtattttattaaaaaattttaatattgtaaatataggaaattgagaattgataaatagaaatattaggaaatgtaaagttttgaagttttaaaataaaaatagtaattttggaaaggtttttaatttatttttttaatggtggggtttgatttagatttttttttgggattttgagtttcgaagtttttaggttcgggattatcggtattttggtatagttcgttgatgatggggttatatatttgttttagttttttttttttgtgtttaaattcgtttttttcggttaaggtgttggcgtttagttacgagatgattttttgatatttgtttagtattttttttttgtcggtttcgttgattttgtttttgagttttttattttttacggcgttttttatgttgaaggcgtaggattttagggcgtttttggttgatattttttcgcgttgtatttcgtttttcgttttgtattttttcgttttttgtattatgcgttcgattttttttttgtttaggcggtttttgtcgttggtgatggtgattttgttggttttgtcggtgtttttgttcgtggtcgtgacgtttaggatgtcgttggtatcgatgtcgaaggttatttcgatttggggtacgtttttgggggtcggagggatgtcgtttagttcgaagcgttttaatagattgttgtttttcgttatggttttttcgttttcgtatatttggattagtatttcgggttggttgtcggagtaggtggtgaagatttgcgtttgtttggtggggatggtggagttgcgtttgattagggtagttattacgttttcggtcgtttttagttttagcgataggggagttacgtttagtagtagtaggttttgtacgttttcggatttgttttttattaggatggtcgtttgtatcgtcgtttcgtaggttatagtttcgtcggggttgatgtttttgtttaggtcgcgttcgttgaagaagttttgtagtagtttttgtattttggggatgcgggtggagttttcgattaggattaggtcgtgaatttgggttttgtttagtttggcgtcgcgtagagttttttttacgggttttagggtgtttcggaataggtcggagtatagtttttcgaatttcgttttggtgatggacgtgtagaagtcgatgtttttaaatagggagtcgatttttaggttggtttgggtgttggacgatagggtttttttggttttttcgtaggcggtgcgtagtcgttttacggttcgtttgttttggttgatgttttttttgtgtttttttttgaatttttttacgaagtggtttattagtttgttgttaaagttttttttatttaggtgggtgttttcggtcgtggtttttatttcgaagatgtcgtcgtcgatcgttaggatggatacgtcgaaggtgttttcgtttaggttaaagatgagtacgttgcgtttttttttgttcgttttgtttaggtcgtaggcgatggcggcggtcgtgggttcgttgatgattcgtagtacgttgagtttcgcgattatattcgtatttttggtggtttggcgttgcgagtcgttgaagtaggtcggtacggtgattatcgcgttggttatcgggtagtttaggtacgtttcggcgattttttttattttggttagtattatggacgagattttttcggggtagaatgttttggtgttttttttgtagtttatttgtattttgggtttgttttcgtcgttgattatttggaaaggttagtgttttatgttcgattgtattatcgggtcgtcgaatttgcggtcgattagtcgtttcgcgttaaatacggtgttttgcgggtttagcgttatttggtttttggtcgtattttcgatgagtcgttcggtgttcgtgaaggttacgtagttgggggtggtgcggttgttttggtcgttggcgatgatttttattttgtcgtgttggaatatttttacgtaggagtaggtggtgtttaggtcgatgtcgatcgtcgcggttttggttatgtcggttttttgttttttgtcggttcggttttgagattgggggttggaaacggaatattggattcgcgagaagagttcggttttttcggacgtcggaaattcgacgcgtcggtgtttgtagtcgtataggttcgttttgggaagttttgggataacgggagttattttcgaaaaaggtagtggattgtcgtagtagttttttaggttagtcgttattcggatcgtttgtttttgggtttttataagtcgttacggagattcgtttttttttttttgagttaattatcgagttcgatgaggttgttaggtcgggaatattttaggggtttcgtttttcgttttgttttttagttttttttggattaattagaggttagagtgtcgttttttgtttagaattttttagagttttttgggatttattggaggggatagggattttgagaggaagggggagtggcggtgggaagggtgttggtttttatggcgatgttgatcgtttgcgttttagcgtttaattgataggaagggtcggcgttgggtttttaattgtgggggtttgttgggtttgcgtagttgtgggtagggggttggtgcggggagcgggttacgcgcgtttaggggagggtgggggcgtttgtgttgatatcgttcggttacgttataatggagatattgtttttgattttatgggttagtttggaaaaagattattgagttggagtcgttttaaatttgtagggagggacggggtggggggtggggggatttcggttgtgtagtttgatattgagggagtttttatttattcgttggggttgcgtaatttggacgtttttaaattgaagcgaaggcgtcgggagattaggtgagttagtagggatttgattgattgtgaatttgaaaggtttagtaggtttttgtttgggaaagtattggaaagttttttagttggtttaagtttgaggtatgtgggcgttggttgattcgggtaggaggagtatttggggaaagttaagatggttttagattgattggtcggagtagttagaatgggggaggcgggggaagggagtgcggtttgtcggggaaatggggaggcggggaaggcggggtaagggggaggcggggtaattgggaagcgggggaaagggagtgcggtttaggaatttgcggtgtggagagggatagatattaaattttttattttatttttatttatttatttttaatttttttttttttttgagacggagtttcgttttgtcgtttagggtggagtgtagtggtacgattttggtttattgtaagttttgtttttcgagtttaggttatttttttgttttagtttttcgagtagtagggattgtaggcgttcgttatcgcgttcggttaattgttttatttttcgggtttaagttatttttttgttttagttattcgagtagttggaattattggcgttcgttattacgtttagttaattttttttattttttagtagagacgaggttttatcgtgttagttaggatggtagttaggatggtttcgtttttttgatttcgtgattcgttcgtttcggttttttaaagtgttgggattataggcgtgagttatcgtttttcgtttttaaattttttattgattagttattggttttagaaaataggagttttatttaggagaaggatatagatattgtttggagtgttatgtcgtttgagaaaattggaaggtttgtggttttttagtagttatttttagtttgattggaatttattgtcggtgaatttttaatagagaatattattttaggaaggtagtagaatttaagtgtggaggttgatgttttttgaagagattagaatgtatattatttttgggttataaagagatagaattttatagtaaaatatataggaataggatagtagaattaggttatttgggaaattgaaaataatatatagttatttgttttttaatttttttgagtagttgagaatatttttgtttattttgtttaaaaagtagtttgttatgatagtagcgtttttatgtatttgtataggtttgtttatagtaatattattttgtaaattttgtaatttgtatttatcgagagatagataagtaaaatgtatataggtcgggtgcggtggtggtttatgtttgttattttagaatttagggagatcgaggcgggcggattatttaaggttaggagtttgagattattttggttaatatggtgaaattttgtttttattaaaaatataaaaattatttgggcgtggtagtgtacgtttgtagttttagtttttcgggaggttgaggttggagaattagtttgaatttaggaggtggaggttgtagtgagttaagattatgttattgtattttagtttgggtaatagagtgagattttgttttaaaataaaattaaaaatagtggtatataaatatgaatattatttagttttaggaaggaaattgtgatatgttataatatggatgaaatttgtgtatataagttaagtgatataagtaaagttataaaaggataaatattgtataattttatttatatgaagttataagagtagttaaatttatagagatagaaaaaagaggtcgggcgttttggtttaagtttataattttaatatttggtgatttggaggtgggaggaggtttttttgagtttaggagtgagaaattagtttgggtaatagggagatttggtttttataaaaaaataaaaaattagttgggtgtggtggtatttatttgtggtttaagttatttgggaggttgagataaaaggattttatgagtttgggaggttaagattgtagtgagttatgattatattattgtagtgtagtttgcgtgataaaacgagattttgtttttaaaaaatgagaaaaaaaaatgtttgttattaggcgataaagggaggggaaaacgggagttatttaatgagtatatagttttagttttgcgagatgaatagaattttggaaattggttgaatatcgttgtgattgaatttattattaaattttatatttaaaaatggttaagatggtataatttgtatgtattttattataataaaaaataaaaaataggttgggcgagatgtttatttttgtaattttagtatttggggaggttggggttgaaggatcgtttgagttttgaaggagtttgagattagtttgagtaatataaggagattttatttgtatataaaattaaaatattagttaggtagagagttggttacggtggtttacgtatgtaattttagtattttgggaggtcgaggcgggcggattatttgaggttaggagtttgagattagtttggttaatatagtgaaatcgtgaaattttatttttattaaaaatataaaaattagttgggcgtggtggtgtttttataattttagttattcgggaggttgagataggagaatcgtttgaatttaggaggtggaggttgtagtgagtttagattatattattgtagtttaaagtaagatttcgttttaaaaaaaaaaaaaattagtcgggtatgttgtttttagttattttggaggttaaggtaggaagattgttggagtttaggagattaaagttgtagtgagttatgattgcgtttttgtattttaatttgggtgatagaggaagattttgttttaaaaaaataaataatattgaaaagtatttttttaaaatagtattttattttttttttataggttttagagaattatggttattgttaagggaatcgttataggtatcgatttgggtattatttatttttgtgtgggggtgttttagtacggtaaggtggagattatcgttaacgattagggtaatcgtattatttttagttacgtggtttttatagatatcgagcggtttattggggatgcggttaagaattaggtagtaatgaatttttagaatattgtttttgatgttaaacgtttgatcggtaggaaatttaatgattttgttgtataagtagatatgaaattttggtttttttaagtgattaatgaaggaggtaagtttaaagtttttgtgttttataaaggggagaataaagttttttattttgaggaaattttttcgatggtattgattaagttgaaggagattgttgaggtttttttgggttattttgttattaatgtagtgattatcgtgttagtttattttaatgatttttaacgttaggttattaaggatgtaggtgtgattgttggatttaatgtgttaagaattattaatgagtttacggttgttgttattgtttatggtttagataaaggaggttaaggagaacgatatgttttgatttttgatttgggtggaggtatatttgatgtgttaattttgattatagatgatgggatttttgaggtaaaggttattgttggggatatttatttgggtggggaggattttgataataggtttgtgagttatttcgtggaggagtttaagaggaaatataaaaaggatattagttagaataagcgagtcgtgaggcggttgcgtatcgtttgcgagagggttaagaggattttgtcgtttagtatttaggttaatttagaaattgatttattttatgaaggtattgatttttatatatttattattagagttcgatttgaagagttgtgtgtagatttgtttaggggtattttggagtttgtagaaaaagcgtttcgggatgttaagatggataaggttaaaatttatgatattgttttagtagggggttttattcgtatttttaaggtgtagcggttgttttaggattattttaatggacgtgattttaataagagtattaattttgatgaggtcgtagtatatggggttgcggtataagtagttattttgatgggggataagtttgagaaggtataggatttgttgttgttggacgtggtttttttgtttttggggttggagacggttgggggcgtgatgattgttttgataaagcgtaattttattatttttattaagtagatatagatttttattatttattttgataattaattcggggtgttgatttaggtgtatgagggcgagagggttatgataaaggataataatttgttggggcggtttgatttgattggaatttttttagtatttaggggagttttttagatcgaggtgacgtttgatattgatgttaatggtatttttaatgttatagttatggataagagtatcggtaaggtgaataagattattattattaatgataagggtcgtttgagtaaggaggagattgagcgtatggttttggatgttgagaaatataaagttgaagatgaggtttagagggagaaaattgttgtaaagaatgttttagaattttatgtttttaatatgaagagtgttgtgagtgatgaaggtttgaagggtaagattagtgagtttgataaaaataaaatattggataaatgtaacgagtttttttcgtggttggaggttaattaattggtagagaaagatgagtttgattataagagaaaggaattggagtagatgtgtaattttattattataaaattttattaaggaggatgtattgggtttgtttgcggaatagggtatgtgtttggaaggtttgttataggttttataattgaagaagtagattaattttttttagaattgaagtattttaggatgtttttatatgtattttattttttttatttttaaatattattattatttttgattagatttgaatttaagttattattttttggaaattttggagaaggagttttatgtattatttattatatttttttatattttgtttttgattttggaatggatttaggaaaattaggtttttttttaaatcgtgtgatgtatttgaatgtttgttatttttagttattttaatatttttttttttgtgtggatgtttatttgttaattagtaaatttgttcgtaaagaaaattatttttggtatttaggttgtgaatgtattttgaaggggagagtttatggagagagtatgtgttttttgattgtgaggttattgtgaatgattaaattggtaagggtaaagtatttgaatttttatgaatttattttgtgtgtgtgtgtgtgtgtgtgtgtgtgtgtgtgtgtgtgtgttttgagagatagtttcgttttgttatttaggttggagtgtagtggtataattttagtttattgtaagttttgttttttgggtttacgttatttttttgttttagtttttcgagtagttggtattataggcgttcgttattatgttcggttaattttttgtattgttttagtagagacggggttttattgtgttagttaggatggtttcgattttttgatttcgtgattcgttcgtttcggttttttaaagtgttggaattataggcgtgagttatcgtgttcggtttatgaatttattgttttaattagttatataatttttgatttttagatatttttagtatagatggaatagatggtaaattataattgtttttaattagttataagttggttttggagtttaggatttaattgggggtggagggataaattttgtttgatgttttgatgttatttataggtaaggtttaggagatttagtatttatgtatttatagagttta

SEQ ID NO: 2416 - DNA, 9899 bp, Artificial Sequence
  chemically treated genomic DNA (Homo sapiens)
tgaattttgtgagtgtatagatgttgaattttttggattttatttataagtgatattaggatattaagtaggatttgtttttttatttttagttgagttttaaattttaaaattagtttgtaattgattaaaagtagttatagtttgttatttgttttatttgtgttaaaggtgtttgaggattaaaaattatgtggttgattgaaataatgagtttatgggtcgggtacggtggtttacgtttgtaattttagtattttgggaggtcgaggcgggcggattacgaggttaggagatcgagattattttggttaatatagtgaaatttcgtttttattaaaataatataaaaaattagtcgggtatggtggcgggcgtttgtagtgttagttattcgggaggttgaggtaggagaatggcgtgaatttaggaggtagagtttgtagtaagttgagattgtgttattgtattttagtttgggtgatagggcgagattgttttttaaaatatatatatatatatatatatatatatatatatatatatataaaatgagtttatgaaaatttaaatattttatttttattaatttaattatttatagtgattttataattagagaatatatgttttttttatgaatttttttttttaaggtatatttatagtttaaatattagaagtaattttttttacgaataaatttattgattgataaataagtatttatataggaagaagaatgttagggtggttggaaataatagatatttaaatatattatacggtttaaagaggggtttagtttttttgagtttattttaaagttagaaataggatgtgagggagtgtgataggtggtgtatgagattttttttttagaatttttaagggatggtaatttagatttaggtttggttaagaataataatgatgtttgaagatgaggggaatgaaatatatgtagaggtattttaggatgttttagttttaaaaagaattaatttatttttttaattgtggggtttgtggtaggttttttaggtatatattttgtttcgtaggtaggtttagtgtattttttttggtagagttttgtgatgatagggttatatatttgttttaattttttttttttatgattaaatttatttttttttgttagttgattgatttttagttacgaaaggagttcgttgtatttatttaatattttatttttattagatttattaattttgttttttaaatttttattatttataatattttttatgttaaaagtataggattttaaggtattttttgtagtaattttttttttttggattttatttttagttttatattttttagtatttagaattatgcgtttaattttttttttgtttaggcggtttttgttattggtgatggtgattttgtttattttgtcggtgtttttgtttatggttgtgatattgagaatattattggtattaatgttaaacgttatttcgatttgaggaatttttttgggtgttggagggattttagttaggttaaatcgttttagtaggttgttgttttttgttatggttttttcgtttttatatatttggattagtatttcgggttggttgttagagtaggtggtgaaaatttgtgtttgtttggtggggatggtggagttgcgttttattagggtagttattacgtttttagtcgtttttagttttagggataggggagttacgtttagtagtagtaggttttgtatttttttagatttgttttttattaggatggttgtttgtatcgtagttttatatgttacggttttattagggttgatgtttttgttgagattacgtttattgaagtagttttgaagtagtcgttgtattttggggatgcgggtggagttttttattaaaataatgttatggattttagttttatttattttggtatttcgaagcgttttttttataggttttagggtatttttaaataggtttgtatataattttttaaatcgagttttggtgatggatgtatagaagttaatgtttttataaagtgaattaatttttaggttggtttgggtgttggacgatagggtttttttggttttttcgtaggcggtgcgtagtcgttttacggttcgtttgttttggttgatgttttttttgtgtttttttttgaatttttttacgaagtggtttataagtttgttgttaaagttttttttatttaggtgagtgtttttagtagtggtttttattttaaaaattttattatttatggttagaattgatatattaaatgtgtttttatttagattaaaaattaggatatgtcgttttttttgattttttttatttaaattataggtaatggtagtagtcgtgggtttattgatgatttttagtatattaagtttagtaattatatttgtatttttagtagtttgacgttgagagttattgaaataggttggtacggtaattattgtattggtgatagggtggtttaaaaaggttttagtagttttttttaatttagttaatattatcgaagagatttttttagggtagaaagttttatttttttttttgtaggatataaggattttgggtttgttttttttattaattatttgaaaaggttaaagttttatatttgtttgtataataggattattaaattttttgtcgattagacgtttagtattaaaaatagtgttttggggatttattgttatttggtttttggtcgtatttttaatgagtcgttcggtgtttgtgaaggttacgtagttgggggtggtgcggttgttttggtcgttggcgatgatttttattttgtcgtgttggaatatttttatataggagtaggtggtgtttaggtcgatgtttatggcgatttttttggtagtagttatggttttttgaggtttatggagaaagaataagatattgttttgggagagtgttttttaatgttatttatttttttgagatagggtttttttttgttatttaggttggagtgtagaggcgtagttatagtttattgtagttttgattttttaggttttagtaatttttttgttttagtttttagaataattggagataatatgttcggttaattttttttttttttgagacggagttttgttttggattgtagtggtgtgatttaggtttattgtaatttttattttttgagtttaagcgatttttttgttttagtttttcgagtggttgggattatgagggtattattacgtttagttaatttttgtatttttagtagagatggggttttacggttttattatgttggttaggttggttttaaatttttgattttaggtgattcgttcgtttcggttttttaaagtgttgggattatatacgtgagttatcgtgattagttttttgtttggttaatgttttaattttgtgtatagatggggtttttttatgttgtttaggttggttttaaatttttttagggtttaaacgattttttagttttagtttttttaagtattgggattataggagtgaatatttcgtttagtttattttttattttttattgtggtaaaatatatataaattgtattattttaattatttttaagtgtagagtttggtagtgagtttaattatagcggtgtttaattaatttttagaattttgtttatttcgtaaaattgaaattgtatatttattaagtaattttcgtttttttttttttttatcgtttggtaataaatattttttttttttattttttagagatagggtttcgttttgttacgtaggttgtattgtagtggtgtaattatggtttattgtagttttgattttttaggtttataggatttttttgttttagttttttaagtagtttggattataggtgaatgttattatatttagttaattttttatttttttgtagagattaggtttttttgttgtttaagttagttttttatttttgagtttaaggaaatttttttttatttttaagttattaagtgttaggattataggtttgagttaaggcgttcgattttttttttttatttttatgaatttgattatttttgtaattttatataagtggaattatatagtatttatttttttgtgattttgtttatgttatttagtttatgtgtataggttttatttatgttgtaatatgttataattttttttttaaggttgagtaatatttatatttatatattattgtttttgattttgttttgagatagagttttattttgttatttaggttggagtgtagtggtatgattttggtttattgtaatttttattttttgggtttaagttaattttttagttttagtttttcgaggagttgggattataggcgtgtattgttacgtttagataatttttgtatttttagtaaaaatagagttttattatgttgattaggatggttttaaatttttaattttaagtgattcgttcgtttcggtttttttaagttttgggatggtaggtatgagttattatcgtattcggtttatatatattttgtttatttatttttcgatggatatagattatagaatttatagaataatgttgttatgagtaagtttatataaatatatggagacgttattgttatggtagattgttttttggatagggtagataaaagtatttttagttatttaaagaagttgggaagtaagtagttgtatattgtttttaattttttaagtgatttaattttattgttttgtttttatatattttattgtgggattttgtttttttatgatttaagagtagtgtatattttggtttttttaagagatattagtttttatatttgagttttgttgtttttttgggataatattttttattaggggtttatcggtagtaaattttagttaggttgaagatgattgttagaaaattataagttttttagtttttttaaacgatatggtattttagatagtatttgtattttttttttaaataaaatttttgttttttggagttaataattgattaataaagggtttaagggcggggggcggtggtttacgtttgtaattttagtattttgagaggtcgaggcgggcggattacggggttaggagaacgagattattttggttattattttggttaatacggtgaaatttcgtttttattaaaaaatagaaaaaattagttgggcgtggtggcgggcgttagtagttttagttattcggatggttgaggtaggagaatagtttgaattcgggaggtggagtaattagtcgggcgcggtggcgggcgtttgtagtttttgttattcggaaggttgaggtaggagaatggtttgaattcgggaggtagagtttgtagtgagttaagatcgtgttattgtattttattttgggcgatagagcgagatttcgttttaaaaaaaaaaaaaaattaaaaataaataaataaaaataaaataaagggtttagtgtttatttttttttatatcgtagatttttaggtcgtattttttttttttcgttttttagttatttcgttttttttttatttcgtttttttcgtttttttattttttcgataggtcgtatttttttttttcgttttttttattttggttgtttcgattaattaatttgaagttattttagttttttttaagtgttttttttattcggattagttaacgtttatatattttaggtttaaattaattagggaattttttagtatttttttaaataaggatttattgagttttttaggtttataattaattagatttttattggtttatttagtttttcgacgttttcgttttagtttggaaacgtttagattacgtagttttagcgagtaggtgggggtttttttaatattaaattgtataatcggggtttttttattttttatttcgtttttttttgtaaatttgagacggttttaatttagtaatttttttttaaattggtttatgaggttagagatagtatttttattgtaacgtggtcgggcggtgttaatataaacgtttttatttttttttggacgcgcgtaattcgtttttcgtattagttttttgtttataattgcgtaggtttagtaagtttttataattaaaagtttagcgtcgattttttttgttaattaggcgttgaagcgtaggcggttagtatcgttatggagattaatattttttttatcgttatttttttttttttttagggtttttgttttttttagtgaattttagaagattttggagagttttgagtagggggcggtattttggtttttgattggtttaaggaaggttggggggtaggacgggaggcgaaatttttggaatattttcgatttggtagttttatcgagttcggtgattggtttagaagggaaaaggcgggttttcgtgacgatttataaaagtttaggggtaagcggttcggataacggttagtttgaggagttgttgcgatagtttattatttttttcgagagtgattttcgttgttttaaggttttttagagcgaatttgtgcggttgtaggtatcggcgcgtcgagttttcggcgttcggaaggatcgagtttttttcgcggatttagtgtttcgtttttagtttttaattttagagtcgagtcgatagagagtagggaatcggtatggttaaagtcgcggcgatcggtatcgatttgggtattatttatttttgcgtgggggtgttttaatacggtaaggtggagattatcgttaacgattagggtaatcgtattatttttagttacgtggtttttacggatatcgagcggtttatcggggatgcggttaagaattaggtggcgttgaattcgtagaatatcgtgtttgacgcgaagcggttgatcggtcgtaagttcggcgattcggtggtgtagtcggatatgaagtattggtttttttaggtgattaacgacggagataagtttaaggtgtaggtgagttataagggggatattaaggtattttatttcgaggagatttcgtttatggtgttgattaagatgaaggagatcgtcgaggcgtatttgggttattcggtgattaacgcggtgattatcgtgtcggtttattttaacgattcgtagcgttaggttattaaggatgcgggtgtgatcgcggggtttaacgtgttgcggattattaacgagtttacggtcgtcgttatcgtttacggtttggatagaacgggtaagggggagcgtaacgtgtttatttttgatttgggcgggggtattttcgacgtgtttattttgacgatcgacgacggtattttcgaggtgaaggttacggtcggggatatttatttgggtggggaggattttgataataggttggtgaattatttcgtggaggagtttaagagaaaatataagaaggatattagttagaataagcgagtcgtgaggcggttgcgtatcgtttgcgagagggttaagaggattttgtcgtttagtatttaggttagtttggagatcgattttttgtttgagggtatcgatttttatacgtttattattagggcgaggttcgaggagttgtgtttcgatttgtttcgaagtattttggagttcgtggagaaggttttgcgcgacgttaagttggataaggtttagatttacgatttggttttggtcgggggttttattcgtatttttaaggtgtagaagttgttgtaggatttttttaacgggcgcgatttgaataagagtattaatttcgacgaggttgtggtttacggggcggcggtgtaggcggttattttgatgggggataagttcgagaacgtgtaggatttgttgttgttggacgtggtttttttgtcgttggggttggagacggtcggaggcgtgatgattgttttgattaagcgtaattttattatttttattaagtagacgtagatttttattatttatttcgataattaattcggggtgttgatttaggtgtacgagggcgagagggttatgacgaaagataataatttgttggggcgtttcgagttgagcggtattttttcggtttttaggggcgtgttttagatcgaggtgattttcgatatcgatgttaacggtattttgaacgttacggttacggataagagtatcggtaaggttaataagattattattattaacgataagggtcgtttgagtaaggaggagatcgagcgtatggtgtaggaggcggagaagtataaagcggaggacgaggtgtagcgcgagagggtgttagttaagaacgttttggagttttacgtttttaatatgaagagcgtcgtggaggatgaggggtttaagggtaagattagcgaggtcgataagaagaaggtgttggataagtgttaagaggttatttcgtggttggacgttaatattttggtcgagaaggacgagtttgagtataagaggaaggagttggagtaggtgtgtaattttattattagcggattgtattagggtgtcggtggtttcgggtttgggggtttcggggtttagggttttaagggagggtttgggttaggttttattattgaggaggtagattaggggtttttttaagattgttgtttttgttttggagttttaagattttgtattttttagtatttttgtttgttagtttttaattttttgtgtttgtaatgttgaaattttttggtgaagtattgaatttgtttttttttcggtttttatatgtagagatgaatttatattgttattttacgattattttttttttttaatatatttaatttaggttattttttaagttggttattttaaagtaaataaattttaaaatttaagtgatgttttttatttttttatttgggggttagtagggtttgtataggttgttttttttatagcgtttaaaatggaatggtatttttgtttttagtaagggtagattttgtagaggtgtgattattgtaatgtgatttatttgtgttagataaatggtattttttagtaaagttttttgattttggttaggagtggtggtttaagtttgtaattttagtattttgggaggttgaggtgggcggattatttgaggttaggagttttagattaatttggttaatgtggtgaaattttgtttttattaaaaatataaaaattagttgggcgtggtggtgcgtgtttgtagttttagggaggttgaggtaggagaatcgtgtgaatttaggaagtagtggtagtagtgagtcgagattacgttattgtattttagtttgggtattatagtaagatttcgttttatatatatatataaaaaagtaaagtttgttgatgttgattgggtttagtttgagggtatagaaaaagtttaatatttgggagggtagttttaaagtgatgtttgtgtaagattggttttaaaagaggtgggaggggggcggggatgtttttgtaaaagtggttaaaaagaatgtagttagatgggaggttagcgtttttattttttgtaggtatatttgatatgtttatggatttgatatttaatttagatttaatatggaatggaaggagtgttttaaattttaaagtgaaaaaacgggtatatttattggtttgttgagttatatatatgtgttttagttgttattttttaaaatggaagggtttggttcgatgttttttttatgattgaaagtatattgaaatagaaatgttatatttttagtagttattatttataatttaagtacgttagtgagtattcgggttaggaagatttatagattttatttttatgtatttttttttggagatgttttatgttttagtcgttagtattttagaa

SEQ ID NO: 2417 - DNA, 8486 bp, Artificial Sequence
  chemically treated genomic DNA (Homo sapiens)
atgtattaatgtagttagttaatttaaaattttttttttttttttttttttttagacggagtttcgtttttattgtttaggttggagtgtaatggtaggattttagtttattataatttttatttttcgggtttaagtaatgttttcgttttagttttttaagtagttgagattataggtatatattattacgttcggttaatttttgtatttttagtagagacggggttttattatgttggttaggttggtttcgaatttttgatttcgtgattcgttcgtttcggttttttagagtgttgggattataggtatgagttatcgtggtcggtattttttttttttttttttgagacggagttttattttgttatttaggttggagtgtagtggcgtgattttggtttattgtaagttttatttttcgggtttacgttatttttttgttttagtttttcgagtagttgggattataggcgtttattattatgtttagttaattttttgtatttttagtagagacggggttttatcgtgttagttaggatggtttcgattttttgatttcgtgattcgttggttttagttttttaaagtgttgggattataggcgtgagtatcgcgtttagttagaatttaaaatttttaataggattattttagaatttttatattttatatataatttatattttttattttttttttgtttaaaatatttttatttttaaagagatagggttttattatgttgtttaggttggttttaaatttttgggtttgagtgatttttttatttcgattttataaagtgttgggatgataagtgtgaatcgttatgtttggtttattttttttttttttttttttagtatttggtatgtgtttgtttgtgtttagaatatttttttttttattttttgtttggaaaaattttgtttttgtagaggaaggagtaatttggatttaaattttggttttgtattttttattttatgattttgggttagtagtttaatttttgtgattttttttgtttggagaatagggattaaaatggtttttattttttggggtttttattttataagtttgtttgtttttttagaagtaaaattttttggtttgtaggtatatgttattgttattatggattaatgataacgtattgtttttaatgagttttttagtgatatttttgagagaaggggttatggataatgtttttttgaattttaatgttaaggttttaggtttataggatttttgggtagttgtagagagttgaggattttttaaggatttatttttttttttatagtttttgttttttttggtggtatgtgatggagttgggttttatgttggttttcgggatgtttatttttataggtttttttaaaatagagatattggttattagtttttttgttttagaagtgtttttttgtattcgttggaggagtagtttatttcggtatataggtatatatttgtttaagttgaagaagtgggagtgtagttttttggtgaagtagatgttttgtagttgtaggggttttaagtagggatagatgtaattagttttgttttttgtatttcgttttattattttgtttttagtattagtatgtagaagggaggtataggggagggtttgcggtgttttattttatgttttgtttggattgttggacgttattttttgggtagagtaggaggagggtaaatttgggtagaggtaggtggggtcggttcggtttatttcgaggggtttatttttttttattaacgtattaattttaggttttagatgtggcggagttttaggatttttagaggataggaaaggttttatgttttaattttttatatttttagggagtgttttttttttattttattttagggaatgagggatagtagtattattatttttttatagtttaaagtggtattttttagatttttaggttagattatttagttttttttggttttttttttttttttattttttatattttattaattattgtatttggattgtttatttttttaatatatttggataatgtttatttttttatatttttttttgtattgttattgtaattagtttagtttaggttagtggatggttttaagtttttttttttggttttttaggatttatttgtgatatttataggtttttttttatttagtagttagggtgagttttgaagggttttagtgtggttaggtggttttttatgaattttaggatagttaagttttttgtttaggagtggaagttttaggtatttttttattcggttatttggttattagagttaagtaattttttgtgaagttagtagagtaggaatttttaggtgtggtaattaggtttttaaatagggttgaacggtatacgtttagttaggggtaaatttgaagttaggatattgggtttttagtttttggtttagaatttttttataggatattttatgtttaatttttaaattttttttaagattgtggggttttggatggtttagagaatagagggttttggaggtttgacgttaaaggagttgtaagatatgttttgtggtcgttttttggttttgttttatgtttaaggttttttttaaattatgtttttttagggatgttgtaggagttataaatttaagttttagttttggggtagaacgttcggaaatcggagtgttagggttttatgaaaaggtagcgagaaggggtttgttttgacgaggttgggttcgtttcgaattttcgttttttttttttttgtttagtatattggttcgggtattttagagatgagggtcgtttatgtaggattggtgattggatacggtgatgaggggcgtggtcgggtttcgtttttcgatgagttcgtatagtatttttttgttgtgtacggttaggtggtttatgtattttggcggggaaggagaggttaggcgtttcgggttcgttcgttaggtcggggtcgcggcgttttttattttaagttttattttcggtcgggtatgggtattcgggcgggtttgtttcggtttgggtttatttattggtttagaagtagttgtaggtgtttattaagtttatgacgacgttgttggttagggtttaggtgagcggcggtatcgcggggaacggttatttttacgtgtagaggttattttattcgatcgtcggtcgggtttttagcgtttcgggtcgatttgtggaacgtttttaggttgcgatttttatcgtttcgatatattggtttttgattggttcgcgtacggacggacgggggcgcggcgtaatagggtattggatcgaggttttttcgtaggttaggtcggagtagcgttcggtttcgttttttcgttattggggagcggttttcgaagttataggtcgtgggcgcgttgcggaacgggaggaaacgggaaagcgggcgttggtatttcggttcggtgtaatcgtcggaaagcgaatttgcgtcggtgtttagttcgatcgattgtcgaaagcgcgtacgggtcgtttgacggtagcgaggttagtttcggggcggcgggaagtggtcgttatttcgtggggttttcgttttttggtagttttttgcgttcgttttttgtttttttagtgtttttgttttttgtttgatatagggtttagttagatttaggttggagtgtagtgatgggattatggtttattgtagtttcgattttttagatttaagcgatttttttgttttagtttttcgagtagttgggattataggcgttcgttattatattttgatttattcgtttcggttttttaaagtgttgggatgatagtcgtgagttatttcgtttagttatatatataatttgatatagttatagtattatatgatattatgtgtatgtagtaatgtataatttattgtatggtaaaatatataatatatatagtaatatatataaatatattgtgtattatatgtaatataagaaatagtattttatattatttgatatagttataatgttagttattatttttagttttgaaatatatttatgattcggaaagaaagttttttatgtattaagtagttagttttttatttttattttatatttatttatttattattatttttttaggagtttcgttttgtcgttagttggagtgtagtggtataatttcggtttattgtaattttcgtttttcgggtttaagttatttttttgttttagttttttgagtagttgggattataggcgtaggtcgttacgttcggttaatttttttttttttttgtattttagtagagatggggttttattatgttgtttaggttggtttcgaatttttgagtttaggtagtttatttattttagttttttaaagtgttaggattataggtatgggttatcgtattcggtagttttttatttttatttttatttatttttatttttgagatagagttttgttttgttgtttaggttggagtgtagtgacgagattttagtttattgtaatttttgttttttaggtttaagcgatttttttgttttagttttttgagtagttgggattataggcgtaagttattatatttggttaatttttgtatttttagtagaggttgggtttttttatgttggttaagttggtttcgaattttcggttttaggtgatttgtttgtttttttttttaaagtgtgagttattttatttggtttgttttttatttttaaattataatttattgatttttttttttgagatggagtttcgtattgtcgttcgggttggagtgcgagtgtagtggtgtgatttcggtttattgtaagtttcgttttttaggtttaagtaatttttttgttttagttttttgagtagttgggattataggcgtttattattacgtcgggttaattttttgtatttttagtagaaacgggttttattatgttggttaggttggttttgaacgtttgatttcgtatttattcgttttagttttttaaagtgttgggattataggtatgagttattacgtttagtttataatttattgattttttaaaatttgtttagttttttattattacgtcgaatttattagttatagttattttatgagaagttgagtggatttagttttattttttgtttatagattttgttcgagtattttatttgttttaatagtattattgtaggatttttaggacgttggattgttagttttttgggtttttttttttttggggtagatttttagtttttttttgattttacgattgtggttagattatgtgtggattgtttttttttttgggtttttagagcgtttgtattaaatatttttaatttagaagtgtgtagttatattgggatttagaatttaataatagggatagaagatttacgtttttggggtgttcggtttcgtggtattaggtatgatttttagtttttgcgttttttttagtaattgttgattggggatttagatcgggagttgagcgacgggtttggcgagcgaagttcggggttttatttaggtattagtttttttttgttttaggtttgagtgatttataggtttgttatgtttcgttggttcgggaaggcggggtttgggtgggaaggtgggcgggtaggttagtagtttttaggtttggtgttggttttttttgttggcggcgaggcggagacgtggcgggtttgtttgttggtaagggtggggcgttcggtttagttaggttttttttggtcgtgtggtttaggaatatagttttttttttttttttttttttttttagttttatttaggtaggagttgtttttttggggtatcgcgatttatttaaggatgaggtagatttggtgataagttggtttgagtaggtatgggagttttttggggagacggaagaagggaggaagttgttttttgtttggggagggtttgagagggagagggaagtttagggtttttattaaggttgatattgatagttagggtttggggttgaagttaggaatcgtcgttttttttggtttttattggtagtttttatgggggtttttgacgttagagtttttaaggttgtatgtgttagtttagggttgtttatatatttatgtatattttagaataggtattagggtagggaatttaaattagtatgagtgatagagtaggtggttagggagaaatagatattaaatttagttaggagagagatatcgtaatagagagatagagaagggaaattagagacgagagggaaagtgagatagagacggatagagttttagagaggtaggaagtgagttcgaagggaaggtgataggttgatagagaaaagtaggtagatagagtagaggaatttatgttttaggatgtaaaagttatatggatagggcgtggagtaaggagtcgagttttgtaaggttaggtgagtgtgagataaagataaattgagagaggggggttttagttggtgagatgaataagaagggttttttagtggtggtaggggtatgggaaagagtttttattataggttgtaatggggatgatttggttatatttgagattttttaaaatgtatatattttttattgtcgggagtttattttaaagagaatattttataagtggggagatagagatgaacgaagatgtttttgtagttgttaatggaggcgaaaagtattggggttttggaataatatggtgaaattttatttttttaaataaattttaaaaattagtttggtagtcgggcgcggtggtttatatttgtaattttagtattttgggaggttgaggtgggaggattatttgaggttaggagtttgagattagtttggttaatatggtgaaattttgtttttattaaaagtataaaaattagtcgggtgtggtggtacgtgtttgtaattttagttatttgggaggttgaggtaggataattttttgagtttgggagacggaggttgtagtgaattgagattaagttattgtattttagtttgggagatagagtgagattttattttaaaaaaagaaaaaaaaaattagtttggtgtggtagtatgtattttgtagttttatttattcggaaggttgaggtgagagtattatttgagtttggaaggtggaggttgtagtgagttgagattatattattgttttttagtttgagtaatagaatgagattattaaaaaaaaaaaaaaaaaaaagggggggggtcgggcgcggtggtttacgtttgtagttttaattatttaggaggttgaggtaggagaattatttgaattcggaaggtagaggttgtagtgagttaagattacgttattgtattttagtttggtgatagagtaagattttattttaaaaaaaaaaaaaaaaaaaaaaaaaaaggtagattaggttaggcgtagtgggttaggtttataatattttagtattggttgggcgtagtggtttatatttgtaattttagtattttgggaggttaaggtcggttgattatttgaagttaggagttcgagattattttggttaagatggtgaaattttgtttttattaaaaaatataaaaattagttgggcgtggtggtgggtgtttgtaattttagttattcgggaggttgaggtagggagttgtttgaatttaggaggttgaggttgtagtaagtcgagattacgttattgttttttagtttgggcgatagagtgagattttgttttaaaaaaaaaaaaaaaaaaaaaaaaaaaaaaaaaaaaattttagtattttgggaggttgaggtaggaagattatttgagtttagtagtttgagattagtttgggaaatatagaatttaggaggttgtagtgagttgtgatggtattattgtattttagtttgggcgatagagtaagattttgttttaaataaataaataataaaagaataagtttgatcgtttgtgtattgttggcgagaacgtaaaatggtgtagttattatggagattaatatgatatttttttagaaaattaaaattagaattattatatgatttagtaattttatttttgggtatatatttaaaagaattgaaagtaggggttgggcgttttggtttacgtttgtaattttagtattttgagaggtcgaggcgggtagattacgaggttaagagatgtatgaggttggggtattagggtttatttttgtaattttagtattttagtaggttgaggtaggagaattgtttgagtttaggagtttaagattagtttgggtaatatagtgagattttgtttttatttaaaaaaaaaaaaaaaaaaaaaaaaggatacggtggtttatatttgtaattttagtattttgggaggttaaggtgggtagtttatttgaggttaggagttcgagattagtttgattaatatgaagaaattttattt

SEQ ID NO: 2418 - DNA, 8486 bp, Artificial Sequence
  chemically treated genomic DNA (Homo sapiens)
agatggggtttttttatgttggttaggttggtttcgaatttttgattttaggtgaattgtttattttggttttttaaagtgttgggattataggtgtgagttatcgtgtttttttttttttttttttttttttttaaatagagataaggttttattatgttgtttaggttggttttgaatttttgggtttaagtaatttttttgttttagtttgttaaagtgttgggattgtaggaatgagttttggtgttttagttttatgtattttttgatttcgtgatttgttcgtttcggttttttaaagtgttgggattataggcgtgagttagagcgtttagtttttgtttttagtttttttgggtatatatttagaagtggaattgttggattatatggtagttttagttttaattttttgaggaagtgttatattggtttttatggtgattgtattattttacgttttcgttaatagtgtataagcggttaagtttatttttttattgtttatttatttgggataaagttttgttttgtcgtttagattggagtgtaatggtgttattatagtttattgtagttttttgaattttatgttttttaggttggttttaaattgttggatttaagtgatttttttattttagttttttaaagtgttgggatttttttttttttttttttttttttttttttttttttgagatagagttttattttgtcgtttagattggagagtagtggcgtgatttcggtttattgtaattttagttttttgggtttaagtaattttttgttttagtttttcgagtagttgggattataggtatttattattacgtttagttaatttttatattttttagtagagatagggttttattattttggttaggatggtttcgaatttttgattttaggtgattagtcggttttggttttttaaagtgttgggattataggtgtgagttattgcgtttagttagtgttgggatattataggtttgatttattgcgtttggtttagtttatttttttttttttttttttttttttttttgagatggagttttgttttgttattaggttggagtgtagtggcgtgattttggtttattgtaatttttgtttttcgggtttaagtgatttttttgttttagttttttgagtagttggggttataggcgtgagttatcgcgttcggtttttttttttttttttttttttttttttgatagttttattttgttgtttaggttggagggtagtaatgtgattttagtttattgtaatttttattttttaggtttaagtgatgtttttattttagtttttcgagtagatgggattataaggtgtatgttgttatattaagttaattttttttttttttttttgagatggagttttattttgttttttaggttggagtgtagtggtttgattttagtttattgtaattttcgttttttaggtttaagagattattttgttttagttttttaagtagttaggattataggtacgtgttattatattcggttaatttttgtatttttagtagagatagggttttattatgttggttaggttggttttaaatttttgattttaagtaatttttttattttagttttttaaagtgttggaattataggtgtgagttatcgcgttcggttattaagttaatttttaaaatttgtttggagagatggggttttattatgttgttttaagattttagtgtttttcgtttttattagtaattataggaatattttcgtttatttttgtttttttatttgtgagatgttttttttaagataaattttcggtagtgaagggtgtgtgtattttaaaaggttttagatatggttaaattatttttattgtaatttgtgatggggatttttttttatgtttttgttattattggggagttttttttgtttattttattagttggagttttttttttttagtttatttttgttttatatttatttgattttgtagggttcggttttttgttttacgttttgtttatgtggtttttgtattttgaggtatgagtttttttgttttgtttgtttgtttttttttattaatttgttatttttttttcgggtttattttttatttttttgaggttttgttcgtttttgttttattttttttttcgtttttggttttttttttttgtttttttgttgcggtgttttttttttggttgggtttgatgtttgtttttttttgattatttgttttgttatttatgttagtttgggttttttattttggtgtttattttgggatatatatgggtatgtgggtagttttgggttggtatatgtagttttggaggttttggcgttagggatttttatgagggttattagtaagaattagagagagcgacggtttttggttttagttttaaattttggttgttaatattagttttggtgggagttttaggttttttttttttttttaaattttttttaggtagaaggtaatttttttttttttttcgtttttttagggggtttttatatttgtttagattagtttgttattaagtttgttttatttttaagtggatcgcgatattttagaagagtagtttttgtttgaatagggttaggaggggaaaaaaaagaggaagaggttgtgtttttgagttatacggttagaaagggtttggttgggtcggacgttttatttttgttaataggtaggttcgttacgttttcgtttcgtcgttaataaggaggattagtattaggtttgggaattgttgatttgttcgtttatttttttatttagatttcgttttttcgggttagcgggatatgatagatttgtgagttatttaagtttggggtaaggaggggttggtgtttgagtgagatttcgagtttcgttcgttaggttcgtcgtttagttttcggtttgggtttttagttagtagttgttggggaaggcgtaggagttggaagttatgtttgatgttacgagatcgggtattttaagggcgtgagttttttgtttttgttgttgggttttgagttttagtgtggttgtatatttttgagttaggggtgtttgatgtaagcgttttggagatttaaagagagggatagtttatatatgatttggttatagtcgtgaagttaagggaggattgaggatttgttttagagaggaggagatttagggagttggtagtttaacgttttgggggttttgtagtaatgttgttgggataaatgaggtgttcggatagggtttgtgagtaggaggtggggttgaatttatttagttttttatgggatggttgtagttaatggattcgacgtggtaatagaaggttggataaattttaaaaaattaataaattatgggttgggcgtggtggtttatgtttgtaattttagtattttgggaggttgaggcgggtggatacgaggttaggcgtttaagattagtttggttaatataatgaaattcgtttttattaaaaatataaaaaattagttcggcgtggtggtgggcgtttgtaattttagttatttaggaggttgaggtaggagaattgtttgagtttggaaggcggagtttgtagtgagtcgagattatattattgtattcgtattttagttcgggcgatagtgcgagattttattttaaaaaaaaaaattaataaattatggtttaaaaataaaaaataggttaggtaggatgatttatattttgggaggagaggtagatagattatttgaggtcgggagttcgagattagtttgattaatatgaagaaatttagtttttattaaaaatataaaaattagttaggtgtggtggtttgcgtttgtaattttagttatttaggaggttgagatagaagaatcgtttgaatttgggaggtagaggttgtaatgagttgagatttcgttattgtattttagtttgggtaatagagtaagattttgttttaaaaataaaaataaataaaaataaaaataaaaaattgtcgggtgcggtggtttatgtttgtaattttagtattttgggaggttgaggtgggtggattgtttgagtttaggagttcgagattaatttgggtaatatggtgaaattttatttttattaaaatataaaaaaaaaaaaaaattagtcgggcgtggcgatttgcgtttgtagttttagttatttaggaggttgaggtaggagaatagtttgaattcgggaggcggaggttgtagtgagtcgagattgtgttattgtattttagttggcgatagagcgagatttttaaaaaaataataataaataaataaatataaaataaaaataaaaaattggttgtttaatgtatagggggtttttttttcgggttatgaatatgttttagaattagaggtagtagttgatattgtgattgtattagatggtataaaatattgttttttgtattatatatgatatataatatgtttgtatatattgttgtatatattgtatattttgttatatagtagattatatattgttatatatatatagtattatgtagtattgtaattatgttaaattgtatatgtggttgggcggggtggtttacggttgttattttaatattttgggaggtcgaggcgggtggattagagtgtgatggcgggcgtttgtggttttagttattcgggaggttgaggtaggagaatcgtttgagtttgggagatcgaggttgtagtgagttatgattttattattgtattttagtttgggtttggttggattttgtgttaaataaaaaatagaaatattagagagataaaaggcgagcgtaggaggttgttaggaagcgggagttttacggggtgacggttatttttcgtcgtttcggggttggtttcgttgtcgttaagcggttcgtgcgcgttttcgatagtcggtcgggttgggtatcggcgtaggttcgtttttcggcggttgtatcgggtcggggtgttagcgttcgttttttcgttttttttcgtttcgtagcgcgtttacggtttgtgatttcggagatcgttttttagtgacgagagagcggggtcgggcgttgtttcggtttgatttgcgaagggatttcggtttagtattttgttgcgtcgcgttttcgttcgttcgtgcgcgggttagttaggggttagtgtgtcgaggcggtagaggtcgtagtttagaggcgttttataggtcggttcggggcgttgggagttcggtcggcggtcgggtggggtggtttttgtacgtgaaagtggtcgtttttcgcggtgtcgtcgtttatttggattttggttagtagcgtcgttatgggtttggtgggtatttatagttgtttttggattagtgagtgggtttaggtcgaggtaggttcgttcgggtatttatgttcggtcggaggtgggatttagggtgggggacgtcgcggtttcgatttagcgggcgagttcggagcgtttgattttttttttttcgttagagtatatgaattatttgatcgtgtataatagggaggtgttgtacgagtttatcgagaagcgaggttcggttacgttttttattatcgtgtttaattattagttttgtatggacgatttttatttttggggtattcgggttagtgtgttgggtagggggaggaaaggcgaggattcgggacgggtttagtttcgttagaataaattttttttcgttgtttttttatggagttttggtatttcggttttcgggcgttttgttttagggttgagatttggatttgtggtttttgtagtatttttgagggagtatgatttggagagggttttgggtatggagtaggattaaggaacggttatagggtatattttatagtttttttaacgttaggtttttagaattttttgttttttaaattatttagggttttatagttttgggaaaaatttgggggttggatataggatattttgtgaggaagttttgggttagggattggaagtttagtgttttggttttaggtttgtttttggttgggcgtgtatcgtttagttttatttgggagtttggttgttatatttagaggtttttgttttgttgattttataggaagttgtttggttttggtaattagatggtcgggtggaggggtgtttggggtttttatttttgaatagagagtttaattgttttagagtttatggggagttatttagttatattggagttttttagagtttattttggttgttgggtggagaaaggtttatagatgttataggtggattttgggaggttaggaaggaggatttggagttatttattagtttagattgggttggttgtagtgatagtatagggagaagtatagaagaatgggtattgtttaagtatgttggggaggtaggtagtttaggtgtagtgattagtaagatgtggagggtgggggagagggaggagttagggagaattgaatgatttggtttaagggtttgaaagatgttattttgggttgtagggaaatggtagtgttgttgttttttattttttgagatggggtgaaggaagggtattttttggggatatgggaagttggggtatgaagttttttttgttttttagggattttgaaatttcgttatatttggaatttgaagttgatgcgttggtgaggaggaatgggtttttcgaagtgggtcgggtcggttttatttgtttttgtttagatttgttttttttttgttttgtttaggaggtggcgtttagtagtttaggtagggtatggggtggggtatcgtaggtttttttttgtgttttttttttgtatgttgatgttgggggtagggtggtggagcggggtgtagggggtaggattaattgtatttgtttttgtttaggatttttgtagttgtaagatatttgttttattaaggagttatatttttatttttttagtttgggtaagtgtgtgtttgtgtgtcgaggtgagttgtttttttagcgagtgtagggaggtatttttggggtaggaaagttggtggttagtgtttttgttttggagggatttatgggggtaggtatttcgggagttaatatgaggtttagttttattatatgttattagagggagtagaggttgtgagaggagggatgggtttttggaaagtttttaattttttgtaattgtttagggattttgtggatttggagttttggtattagaatttaaggaggtattatttataatttttttttttagggatgttattaagagatttattgagaatagtgcgttgttattggtttatggtggtagtagtatgtatttgtaggttagagggttttgtttttaggagaataaataggtttgtggggtgagaattttaggggataggggttattttgatttttattttttagatagggaggattatagagattaagttgttggtttaaggttatggggtaggaggtgtaaagttaggatttgaatttagattgtttttttttttgtaggagtagaatttttttaagtagagaatgaggggaaaggtgttttagatataggtaggtatatgttaggtgttggaaaaagaagagagaaaggtaagttaggtatagcggtttatatttgttattttagtattttgtgaggtcgaggtgagaggattatttaagtttaggagtttgagattagtttgggtaatatagtaagattttgtttttttaaaaataaaaatattttaaataaaagaaaggtagaaaatatgagttgtatgtagaatatgaaggttttagaataattttattaagaattttggattttggttgggcgcggtgtttacgtttgtaattttagtattttgggaggttgaggttagcggattacgaggttaggagatcgagattattttggttaatacggtgaaatttcgtttttattaaaaatataaaaaattagttgggtatggtagtgggcgtttgtagttttagttattcgggaggttgaggtaggagaatggcgtgaattcggaaggtggagtttgtagtgagttaagattacgttattgtattttagtttgggtgatagagtgagatttcgttttaaaaaaaaaaaaaaaaagtgtcggttacggtggtttatgtttgtaattttagtattttgggaggtcgaggcgggcggattacgaggttaggaattcgagattagtttaattaatatggtgaaatttcgtttttattaaaaatataaaaattagtcgggcgtggtggtgtgtgtttgtaattttagttatttgggagattgagacgggagtattgtttgaattcgggaggtggaggttgtggtgagttgagattttgttattgtattttagtttgggtaataagagcgaaatttcgtttggaaaaaaaaaaaaaaaaaaagaattttgaattagttggttgtattggtgtat

SEQ ID NO: 2419 - DNA, 9060 bp, Artificial Sequence
  chemically treated genomic DNA (Homo sapiens)
attataggcgtgagttattatacgtagtttttttgttattagattttgttattattgatttttttttttttttaatagaaatagggttttttttttttaggttaaagtatagtggtatgattatagtttattatagttttaaatttttgggtttaagtgatttttttgttttagttttttaagtagtagggattataggtgtgtattattatatttagttaattatttatttatttatttatttatttattttgagatggagtttcgttttgttatttaggttggagtgtagtggtacgattttagtttattgtaatttttattttttaggtttaagagatttttttgttttagtttttcgagtagttgagattataggcgtgtattattatgttagattaatttttgtatttttaatagagacggggttttattttgttggttaggtttatttcgaatttttgatttcgtggatttattttttttggttttttaaagtgttgggattaaaggcgtgagttatcgcgttttgttaatttttttttaattttttttagagatgggggtttttttatgttgtttaggtttgttttgaatttttggttttaagtgatttttttgttttggttttataaagtgttaggattatagtttgagttattatatttggttaataggtttttttttttgttttgttttgttttttaaagaatgtttaggttaggtttatttatttttatttgtaattttagtattttgggaggtcggggtgggtagattatttgaggttaggaattcgagattagtttgggtaatatgttgaaatttcgtttttattaaaaatataaaaattagttgggtgtggtgatacgtgtttgtaattttagttatttaggaggttgaggtaggagaattgtttgaatttaggaggtagaggttgtagtgagttaagattatgttattattttttagtttgggcgatagaaggagatttagtttaaaaatttaattaattaattaattaaaaataaaaatataaaaattaatttggtgtggtggtgtgtgtttgtaatttaagttatttaggaggttgaggtaggagaattttttgaattttagaggtagaggttgtagtgagttaagatcgagttattgtttgtttagtttagtgtattgggttgttgaatttatttgattagatatttagtaatagattttgaagtttttttttattttttattttaagatgttgttgttatgaataaggaatattttgattttttttataaatattcggggtttttttattagtttttattgaagattttgatatttttatttgtttaggtgtttgggcgtgtttgggggagatattgaagaggtagggtttttaggtaggtgtagttcgtttgttaggtaggtagtaaggtttattttattagatatttttatttttgtttttttgtagggattttagaacgggtggaattggtatttttttttttttggtagttagtgggtaagaattttattttacgttgttaggtggagggtggggtatttcgggttaattttatcgtggtgttgtttcgtggggagaaggagttgaaacgggagttagttgtgggggagttcgttgaggttacgattacggtgttggtgaggagagattattatggagttaatttttcgtgtcgtattgaattggatttgcggttttaagggttggagttgtttgagaatatttcggttttttattagttttagatttttggtgaggattgaagaagttagtagggagaaggtgggggtggggtattttgtaatgcggtgtttgtggttataggattttttgagatgggtgtggtttcggttaaggggtgtatgtgttttaggcgtatgtgatttaggttgttgagtggttttggaagaggatttcgtaggagggggaatgaaatgttttagagaagggtttcgggacgtttatttttgtttgtttatattttttttttttttttagttttgttagcgatttttttataatttgttagttttcgggttttagaggtggatacgtaggggatcgtggtttgttttttggacgggttgtttttagtttcggaggtttaggtttatttggtattgggggattagaggttgaattttatagttatttatggtaacgattttttttcggttaaggttttagttagtgtgatcgtagaggacgagggtatttagcggttgacgtgtgtagtaatattggggaattagagttaggagatattgtagatagtgattatttatagtaagaaggggtaggggcggagtggggttttttgggggtgtgatttgaattcggggcggggtttattgtgtgtttattttaggtttttcggcgtttaacgtgattttgacgaagttagaggttttagaagggatcgaggtgatagtgaagtgtgaggtttattttagagttaaggtgacgttgaatggggttttagtttagttattgggttcgagggtttagtttttgttgaaggttattttagaggataacgggcgtagttttttttgttttgtaattttggaggtggtcggttagtttatatataagaattagattcgggagtttcgtgttttgtgtgagtggggttgttggttaatggtttttattttttaaggtttaatttttttgaaggttttataaggttttgtttttaagttttgtttttatttatttttatgttattttatcgtgtttttttagatggttttcgattggacgagagggattgttcgggaaattggacgtggttagaaaatttttagtagattttaatgtgttaggtttgggggaatttattgttcgagtttaagtgtttaaaggatggtatttttttattgtttatcggggaattagtgattgttattcgagattttgagggtatttatttttgtcgggttaggagtatttaaggggaggttattcgtaaggtgatcgtgaatgtgttttgtgagtgagtcggcgggtagagttgggtgggggtaggggttatggatttaatgtaatttttatcgtttgttgtattttttttatagtttttcggtatgagattgttattattattgtggtagtagtcgtagttataatgggtattgtaggttttagtacgtatttttataatcgttagcggaagattaagaaatatagattataataggtttaaaaagggatttttatgaaatcgaatatataagttacgtttttttgaatttatttcgggatagggtttttttttcggtttttttatattggtggtagtggtgttatattgaatagagtggaagatatatgttatgtagttatatttatcggttttgggacgtcggaggatagggtattgtttttagttagatataatagtatttggggttatggtatttgtatatttaaaatattaggttacgtatttgatttgtagttatatgattaagttaagaggaaggagtaagatttaagatatgattgatggatgttaaagtttagtttgatgagaggggaagtggtgggggagatatagttttattatgaggatatataattgggaaatattgaaatttgttgtttattgggtatgttgaggttttatagatttatagaagaagtggttttttatagatatgtgtagtattaaaatataaaggtttatattttttgacggatgttagtttgggtattgttgtttattgattttaatttttgatgatatgtatttatttatttgttattttattagttatttattgagtgttttttatgtaggttaaatgaatataggtttttggttttacggagtttttagttttaattatatttaaggttattaggtatagttgtataggttgtatattgtaggagagtgtttggtaaaaagattaaatggggttgggattttttattggttaatttgtttttttttagaaggagtgatttttttatcggtataaaagtattatatggattggtaatggttataggtttagagattatttagtgaggttttattttttttttttttttaaaattgatatttttgttagttatttttttatttatatatatttttgttagtgtttataatgatatttagcggttatgtttggatatgagtgtttagggaatatgtttaagttatgttttgtttttttgttttgtttgtattttattgggagtttgtattatgtagttttagttttttgtagtgattagggttttgtaagtagtggggaagggggttaaggtattggaggatttttttttagttttggaagttttattcgcgtgtgtgtgtgtgtgtatgtgtagataagttttcgttttgttatttaggttggagtgtagtggtgtaattatggtttattgtagttttgattttttgggtttaagtgatttttttattttagttttttgagtagttgggattataggtttataatattatatttggtaaatttgattttttttttttttttagagacggggtttcgtaatattgtttagattttttttgtgttagttaataaagtttttttaattgttttagttttgtgtgagttgaggggaggtgttatatttagttggagttttttttaagtagttatagtttgatttttttatttttttttttaagaaaatattgtgggttgatggttatattttgaggttttggtttaaatcggattttttatgattttttgggtttttagtgaaaattaaagatttttttttagaaaaaaatatttggtttttaatgaggtttggaattttatttttgatttggggagcggaatttttttttgtagtattttcgggttttttgttggggttttttttttttttttagggtggagtcgaggaggcggggttgcgggtttttttatttttagagtcggttttggttttttggcgcggggttttttagttcgggttttttgttatggggtttttgttttttttgtcgttgttgttttttttggcggtcgtttattcgggagttgggagcgcgttgggacgtcggattaagcgggcgtaaagttttaagggtagttttttcgcgtttttcgggattttagtgtttttttgggtgcgtatgagttcggagttcgtggttgtgtagtcggggaagttagtgtagtttaattgtagtaatagttgtttttagtcgtagaattttagttttcgtatttcgttgcggtaaggtaagacgtttagagggtcgggttgggtgttttattagttgttcgacgtgagggtttggagttttttcgcgtattgtttcgtgatttgcgtaggaaaaatacgttgggttatttttaggattatcgtttatagtgagggataggggttcggtttcggttggggtgaggggagggggttggaagaggtgggggaagggtagttgatagtcgttttatagggagcgttcgcggattttatttagaggtttttttttgttttagaatcgttttatagcgtgattttggagttttcggttttaaagggtaggaaatatattttgcgttgttacgtgacgtaggtgttttcggtgggttatttggtggtgattttgaggtatggaagtcgggttatttatttcgaaagtttggagcgttttatcggtttggatttggttaacgtgattttgatttacgagtttgttgttggatttcgcgatttttggtagttcgtgatttgttacgcgcgttttaatttcgacggtttggtggttcgtaatagttcggtatttattatattgatgttcggtgaggtatttttgtaattttggggattaggaggaagggggtagagagagttatgatttcgagagggcgtatagattaagcgtgagttttacgcgggtcgatagatttttttgtgtttcgtttttaattttcgttttttgtttttagtttggagtttcgcgtttatagttttggttttcggttttatcgttgtttttgtagggattttttttattgtgggcgttgcgtatttatgtaagtgtttagttatgaagttttaggcgtaaagggggatgttttatgtcggttgagcgagaaaaagaggaatatgaaataatttggggaaatggttatatatggtggttgacgtttgtaattttagtattttgggaggtcgaggtaggagaatcgtttgagtttaggagttcgagattagtttggataatatagtgagatttcgtttatgtaaaaaatatataaattagtttggtgtggtggttcgtatttgtggttttagttattcgggaggttgagttgggaggattttttgagttttgaaagtcgaggttgtagtgagttttgatcgtgttattgtattttagtttgggggatagagtacgattttgtttttaaaaataaaataaaaataaaaataaatattggcgggggaattttttggaattaataaaggtttttttaattagtttttgttttgtgatttaagggttcgtattattgttttttttcggaggaattggtttgtttttgttgttgttgttgtttttgcgattattttttttaagttttttgtttttttgagggtatttgaggtttttttatttagggtttatttggggtttcgaagttttagattttgtgtatttttagcgggtgttatagaaatttttttttttgttggttttatcgagtgggattagcgcgggtcggggagagttacgggtaggggcggggtggggtttatggtatggtttttttgattggcgtcgtcgttattacgcggtagttttgattggatgttaagttttttattttagttttatttttagattttgtgtttttttggaggttaaataattgtggagcgagaatttatttttaaaataatttattacgttggagtgagattacgaatggtggggaggggagggttttacggatatattgagggacgtggatacgtagaagaggtatttatgtggtggtagtcgggaaggggtgattagatggtttatagggaatattataaattcgaattttgacgatgttttggtagttatttagttagatgagcgtatggagttgggggtggggggtgttaaagtttggggttcggaagcggagttaaaagtattattttcggttttttgttttcgcgtggatgttagggtttttatttatcgagtagaaggcggatttaggggcgttttagggtggttcgagtttatatacgttgagtagatacgtgttcgttgtattttgggtaaatatagattcggagtcgagcggattttaatttagacgttcgcgaacgttgcgcgtacgtatacgtgttttcggttcgttggtattttcgtttcgtttttttcgtcgcgtgcgggagttgattcggaggggtgtttagaggtatggtttcgcggggttaaaaggagaaggattagtgagagaggtatttttatatttttttttagaattgttttttttttatttagtgttttttaaattttttttagtttttaaatgtattttcgttttaaggggcgatggtgggaggagttaaatgtgggggcggggttcggagtttagtttattattatggtattttagttagggttggggtaggggtttgggaagggtaatttagtatttttcgattttagagtcgcggtcggggatgacgcgagagagcgtggtcgtttttagaaggttttgggttattatgtcggtttttacgtagattttaggggtcgtttatttttgttagttcgtttttattaaggttaggagtttagcgtacgttcgtttttcgttttttcgtcgtttttgtcgtcgttttttttttggaaattaagttattaacgttaaattaatttttaagcgtaattttgttttttttatattttattcgtcgcgtcgcgcggagtcgttttttagtttagtttttcggttcgcgtttttttcgttttttgtgtttttttcgtcgcggcgatgttagggttttcgttagggttgcgtcgggcgttattcggtttttgggttgttttgggtttggggtttttcggttttttaggtaagagtttcgttttggttcggggtggatagggcgggggcggagtttttggatttgagaaacggttttttgttttttttagttttgttttcgtttcgtttttacgtttttgtttttatttcgagtttgagtttttttttttttttttttttttttaatatatattcgagttttagttttttgatttttcgatagtttttattcgtttcgagattttaggtgttttttcgtatttaatttttcgttttggagatttagtgttttttttgttcgtttttcgggtatttttttacgttgtgttgtgtattatggtttacggattggtattttttttattcgcggttcgcgaagattttatttttttaattattttgatttagaggcgttgttttcgttttatttagagttttggtaatcgggttttttagttgttttcgcggttttttttatgagtttagttttgcgtttcggtttcgtgttttttatcgggtgtagggttttttttgatttttgatttagtttcgttttttttttgtttttgtcgtaaacgtatttttttcgtatttcggtattttgttaggattttgagaattggtttattttttattttttatttcgggttttttttttttagttttgttgtgtttatttaagaatttatttttttttttttttacgttttttttttatgttttttcgtcgttttatcggcgttttggagattatggttttttgttattacgttttagagatattttcgaggtttagattttgggagtgcgtttttaaatcggaggtttgggtaggacgcgggacgtttgggttttttttttggttgtagtttttttttttttttttcgttttttgagaatttttgattcgatataggggcgttaagatgttagggagttggttttttaggtttagttcgcgtttttttgggtagt

SEQ ID NO: 2420 - DNA, 9060 bp, Artificial Sequence
  chemically treated genomic DNA (Homo sapiens)
gttgtttagggaaacgcgggttgagtttggggagttaattttttgatattttagcgtttttatgtcgagttaagggtttttagagggcggggaggaggaggagaggttgtagttagggaaagaatttaggcgtttcgcgttttgtttaggttttcggtttaaaggcgtatttttagagtttaaatttcgagggtgtttttgggacgtggtagtagagagttatggtttttaaagcgtcgatggagcggcgggaaagtatggggggagggcgtagaggagaggaaaggtgggtttttggatgaatatagtaaggttgagagaaggggattcgggatgggggatgggggatgaattagtttttagggttttggtagaatgtcgggatacgaggagagtgcgtttgcggtaagggtaaaggagagacgaggttgggttaaggattaggaaggattttatattcggtgaagaatacggagtcgggacgtaaggttgggtttatggaaggaatcgcgggaatagttgagggattcggttgttagggttttgggtggagcgggaatagcgtttttgagttagggtagttggagagatggagttttcgcggatcgcgagtggggaagatgttagttcgtggattatggtgtatagtatagcgtaaggaggtattcggggagcggataggagagatattgggtttttagggcgaagggttgggtgcggaagaatatttaggatttcgaagcgggtaggggttatcgaggagttaggaagttggggttcgggtgtgtgttggggaggagggggaaggggagaagatttaggttcgaggtgggggtagaggcgtgggagcgaggcgagggtagagttgggagggataggaggtcgttttttaggtttagggatttcgttttcgttttgtttatttcgaattagagcggggtttttatttgagaggtcgaagagttttaggtttagagtagtttagaggtcgagtagcgttcggcgtagttttggcgaaggttttggtatcgtcgcggcggggaaagtataggaggcgaggagagcgcgagtcgaggagttgggttagaggacggtttcgcgcggcgcggcgggtggggtgtgggggaggtagagttgcgtttggggattggtttaacgttggtaatttggtttttaaggagggggcggcggtagaggcggcgggggggcgggaggcgagcgtgcgttaagtttttggttttggtgaaggcgagttggtaggagtgagcgatttttggggtttacgtggaggtcggtatgatggtttagggttttttgggggcgattacgttttttcgcgttattttcggtcgcgattttgggatcgggggatgttgggttgttttttttaaatttttattttagttttggttgagatgttatgataataagttggatttcgagtttcgtttttatatttagttttttttattatcgttttttagggcggggatatatttggggattaagagagatttgggaggtattggatggggaaaggatagttttaggggagggtgtggggatgttttttttattgatttttttttttttgatttcgcggagttatatttttaagtattttttcgggttagttttcgtacgcgacggagggggcgggacgaaagtgttagcgagtcgaggatacgtgtgcgtgcgcgtagcgttcgcgggcgtttaaattagaattcgttcggtttcgggtttgtatttatttagggtgtagcgggtacgtgtttatttagcgtgtgtgagttcgagttattttggagcgtttttgagttcgttttttgttcggtgggtgggggttttgatatttacgcgagaataagggatcgagggtgatgtttttgatttcgttttcgggttttaagttttgatattttttatttttaattttatgcgtttatttggttgggtgattattagaatatcgttagaattcgagtttgtgatattttttgtggattatttgattattttttttcggttgttattatatggatattttttttgcgtatttacgttttttaatatgttcgtgggatttttttttttttattattcgtggttttattttagcgtggtaagttattttggagatgagttttcgttttatagttgtttggtttttaggaaagtatagggtttgaaggtggggttgggataggaaatttaatatttaattagagttgtcgcgtggtggcggcggcgttaattaggaaagttatattatgaattttatttcgtttttgttcgtggtttttttcggttcgcgttgattttattcgataaggttagtagaaggagaggtttttgtgatattcgttggggatatatagagtttggggtttcgggattttaggtgggttttgagtgaggaaattttaggtgtttttagggagataaggaatttggagaaagtgatcgtaaaaataataataataataaaaataaattagttttttcgaagaagggtagtaatgcggatttttaggttataggatagaggttggttaaggaagtttttattgattttagagggttttttcgttaatatttatttttatttttattttatttttggagatagggtcgtgttttgttttttaggttggagtgtagtggtacgattaaggtttattgtaatttcgatttttagggtttaaaggatttttttaatttagtttttcgggtagttgggattataggtgcgggttattatattaggttaatttgtgtattttttgtatagacggggttttattatgttgtttaggttggtttcgaatttttgggtttaagcgatttttttgtttcggttttttaaagtgttgggattataggcgttagttattatgtatggttatttttttagattgttttatatttttttttttttcgtttagtcggtatagaatatttttttttacgtttgggattttatagttaggtatttgtataggtacgtagcgtttatagtgaggaggatttttataagggtagcgatggaatcggaggttaaagttgtgggcgcggggttttaagttgggagtagaaggcgagaattaggaacggaatatagggaggtttgtcgattcgcgtggagtttacgtttggtttgtgcgttttttcggggttataattttttttgtttttttttttttagtttttagggttataggggtgttttatcgagtattagtgtaatgggtgtcgagttgttgcggattattaggtcgtcgagattgaggcgcgcgtggtagattacgggttgttagaagtcgcggggtttagtagtaaattcgtaggttaaggttacgttggttagatttaggtcggtgaagcgttttaggttttcggaatagatgattcggtttttatgttttagggttattattaagtagtttatcgggaatatttgcgttacgtggtagcgtaaagtgtattttttgttttttaagatcggaggttttaaaattacgttgtggggcggttttaaggtaagggggagtttttgagtgaggttcgcgggcgttttttatagagcgattgttaattattttttttttattttttttagttttttttttttattttagtcgggatcgagtttttgttttttattgtaggcggtgattttggaggtggtttagcgtgttttttttgcgtaggttacgaggtagtgcgcgagggagttttaggtttttacgtcgagtagttggtaagatatttaattcggttttttgagcgttttgttttgtcgtagcggggtgcggaggttggaattttgcggttggggatagttgttgttgtaattgagttgtattgattttttcggttgtatagttacgaatttcgggtttatgcgtatttagaagggtattgaggtttcggagggcgcgagagggttatttttggggttttgcgttcgtttagttcggcgttttagcgcgtttttaattttcgggtaggcggtcgttaaaaaaaatagtagcgatagagggaatagagattttatggtaaaaagttcggattaaggggtttcgcgttagagagttagggtcggttttagagataaggaggttcgtagtttcgttttttcgattttattttggagaggaaggggaggttttaatagagggttcgggagtattgtaaaaagggatttcgttttttaggttaagaataagattttaggttttattagaaattaaatgtttttttttggagaggagtttttagtttttattagagatttagaaggttatagaaagttcgatttggattagaattttagggtatggttattaatttataatgtttttttgggggaggaagtgggaggattaggttgtggttgtttagaaaggattttagttggatgtgatatttttttttaatttatataaggttgaggtagttgagaaagttttattaattaatataaaggaagtttgggtaatgttgcgagatttcgtttttggaaaaaaaaaaaaaattaaatttgttaggtgtggtgttgtgagtttatggttttagttatttaggaggttgaggtgggaggattatttgagtttaaaaggttaagattgtagtgaattatgattgtattattgtattttagtttgggtgatagagcgagagtttgtttatatatatatatatatatatacgcggatgaggtttttaaagttgggagggagttttttaatattttggtttttttttttattgtttgtaggattttgattattgtaggaaattggagttgtatagtgtaagtttttagtgaaatgtaaataggataagaggataaggtatagtttgggtatattttttgggtatttatgtttagatatgatcgttgagtgttattgtgaatattggtagaaatgtatgtgggtggggaggtggttaataaaggtgttagttttggggggaagggaggaataaggttttattgggtaatttttgaatttgtaattattattagtttatatagtgtttttgtgtcgatagaaaaattattttttttggggaaaggtaggttggttaatgagaagttttagttttatttgatttttttgttaggtatttttttgtagtgtataatttgtataattgtatttggtgattttgaatgtgattaggattgggagtttcgtgaggttagagatttatgtttatttagtttatataaaagatatttaataaatagttggtaaaataataaatgaataaatatatattattaagggttggggttagtagatagtagtgtttaagttggtattcgttaggaagtgtgggtttttgtgttttgatgttatatatgtttatggagggttattttttttgtaagtttgtggggttttagtatatttaataggtagtaagttttagtattttttagttgtatgtttttatggtggggttatgttttttttattatttttttttttattaggttagattttaatatttattaattatgttttgagttttgttttttttttttggtttagttatgtgattatagattagatgcgtggtttagtgttttaggtgtgtaggtattatggttttaaatgttgttgtatttgattgaggataatgttttgtttttcggcgttttagggtcggtaggtgtagttgtatggtatatgttttttattttgtttagtgtggtattattgttattaatatgggaaggtcgaggaagaggttttgtttcgggataggtttagggaggcgtggtttgtgtgttcggttttatgggggtttttttttgggtttgttgtagtttgtattttttgatttttcgttggcggttatagaggtacgtgttgaggtttgtagtgtttattatgattgcggttgttattatagtgatgatgataattttatatcggggggttgtggggaggatataataggcggtgaggattgtattaggtttatggtttttgtttttatttagttttgttcgtcggtttatttatagagtatatttacggttattttgcgggtgatttttttttgagtgtttttggttcgatagaggtaggtgtttttaagatttcgagtgatagttattgatttttcgatgggtagtgggaaagtgttattttttagatatttgagttcgggtaatgggtttttttaagtttggtatattggagtttgttgggaattttttggttacgtttagtttttcggataatttttttcgtttagtcgggggttatttggaaaaatacgatgagatgatatggaggtgggtgggggtaggatttggaggtaagattttatgggatttttagggagattgggttttgggggataggggttattgattagtagttttatttatataggatacgaagttttcgggtttggtttttgtgtataagttggtcggttatttttagggttgtagagtaggagaagttgcgttcgttgttttttggggtggtttttagtaggagttgggttttcgggtttagtggttgggttggaattttatttagcgttattttggttttagggtgggttttatattttattgttatttcggttttttttgagatttttggtttcgttagaattacgttgggcgtcggaaagtttggaataggtatatagtgagtttcgtttcgggtttaggttatatttttaagaagttttatttcgtttttgtttttttttattgtagatggttattgtttgtagtgttttttggttttggttttttagtattattgtatacgttagtcgttgggtgttttcgttttttgcggttatattgattgaggttttggtcgagaaggagtcgttgttataggtgattgtggggtttaatttttggttttttagtgttaggtggatttgggttttcgagattgggaatagttcgtttagggaatagattacggttttttgcgtgtttatttttaggattcgggggttgataagttgtgggggagtcgttggtaggattagggagagaagaaaggtgtgagtagatagggatggacgtttcgaagtttttttttggggtattttatttttttttttgcgagatttttttttagggttatttagtagtttaggttatatacgtttagaatatatgtattttttagtcggggttatatttattttaaaagattttgtggttataggtatcgtattgtaggatattttatttttattttttttttgttggtttttttaatttttattaaaggtttggagttggtagggggtcgaggtgtttttaaatagttttagtttttggggtcgtaggtttagtttagtgcggtacgagaaattggttttatggtgatttttttttattagtatcgtggtcgtgattttagcgggtttttttatagttggttttcgttttagttttttttttttacggagtagtattacggtgaggttggttcggggtgttttattttttatttggtagcgtagggtaaggtttttgtttattggttgttaagaggggaggggtgttagttttattcgttttggagtttttgtaggaaaatagaggtgggggtgtttggtgaagtggattttgttgtttgtttaatagacgaattgtatttgtttgggagttttatttttttagtattttttttaaatacgtttagatatttaagtagataggaatgttaagatttttagtgaaaattggtaagagggtttcgagtgtttgtgaaggggattaaaatattttttatttatgatagtagtattttagagtgaaaagtggaaaagaattttaaagtttattgttaggtgtttggttaaataaatttagtagtttagtgtattagattgggtaaatagtggttcgattttggtttattgtaatttttgtttttgggatttaggggatttttttgttttagttttttgagtagtttagattataggtatatattattatattaggttaatttttgtatttttatttttaattaattaattaattaagtttttagattgagtttttttttgtcgtttaggttggagggtgatggtatgattttggtttattgtaatttttgttttttgggtttaagtaatttttttgttttaattttttgagtagttgggattataggtacgtgttattatatttagttaatttttgtatttttagtagaaacggggttttagtatgttgtttaggttggtttcgaatttttgattttaagtgatttgtttatttcggttttttaaagtgttgggattataggtgaaagtaaatgagtttggtttagatattttttaaaaaataaaataaaataaaaaaaaaaatttgttggttaggtgtgatggtttaggttgtaattttagtattttgtgaggttaaggtaagagggttatttgaggttaggagtttaagataagtttgggtaatatagggagatttttatttttaagaaaaattaaaaaaaggttggtagggcgcggtggtttacgtttttaattttagtattttgggaggttaaggagggtggatttacgaagttaggagttcgagataagtttgattaatagagtgaaatttcgtttttattaaaaatataaaaattagtttggtatggtggtgtacgtttgtagttttagttattcgggaggttgaggtaggagaattttttgaatttgggaggtggaggttgtagtgagttgagatcgtgttattgtattttagtttaggtgatagagcgagattttattttaaaataaatgaatgaatgaatgaatgaatggttaattgggtgtggtggtgtatatttgtagtttttgttatttgggaggttgaggtaggaggattatttgagtttaggagtttaaggttatagtgaattgtgattatgttattgtattttagtttgggaaagaaagattttgtttttattaaaaaaaaaaaaaagttagtaatgatagagtttaataataaaaaggttgcgtgtggtggtttacgtttgtaat

SEQ ID NO: 2421 - DNA, 22 bp, Artificial Sequence
  ESR1 detection primer
agggggaattaaatagaaagag

SEQ ID NO: 2422 - DNA, 22 bp, Artificial Sequence
  ESR1 detection primer
caataaaaccatcccaaatact

SEQ ID NO: 2423 - DNA, 18 bp, Artificial Sequence
  ESR1 detection oligomer
tttaatttcgggttgtgt

SEQ ID NO: 2424 - DNA, 18 bp, Artificial Sequence
  ESR1 detection oligomer
tttaattttgggttgtgt
